(19) United States
(12) Patent Application Publication
(10) Pub. No.: US 2019/0076521 A1
(43) Pub. Date: Mar. 14, 2019

(54) SOYBEAN ALLERGY ANTIGEN

(71) Applicant: HOYU CO., LTD., Aichi (JP)

(72) Inventors: Kayoko Matsunaga, Aichi (JP); Akiko Yagami, Aichi (JP); Naoshi Shimojo, Aichi (JP); Masashi Nakamura, Aichi (JP); Nayu Sato, Aichi (JP)

(21) Appl. No.: 16/081,032

(22) PCT Filed: Mar. 3, 2017
(86) PCT No.: PCT/JP2017/008593

§ 371 Date: Aug. 30, 2018

(30) Foreign Application Priority Data
Mar. 3, 2016 (JP) 2016-041547

(51) Int. Cl. A61K 39/35; A61P 37/08; C07K 4/10; G01N 33/53; A61K 49/00

(52) U.S. Cl. CPC A61K 39/35; A61P 37/08; A61K 49/0006; G01N 33/53; C07K 4/10

(57) ABSTRACT

The present invention provides novel antigens of an allergy to soybean, methods and kits for diagnosing an allergy to soybean, pharmaceutical compositions comprising such an antigen, soybeans or processed products of soybean in which such an antigen is eliminated, and a tester for determining the presence or absence of a soybean antigen in an object of interest.

### TECHNICAL FIELD

[0001] The present invention relates to a novel antigen of an allergy to soybean. The present invention also relates to a kit, a composition, and a method for diagnosing allergy to soybean. The present invention also relates to a pharmaceutical composition comprising such an antigen and soybean or processed products of soybean in which such an antigen is eliminated or reduced. The present invention further relates to a tester for determining the presence or absence of a soybean antigen in an object of interest.

### BACKGROUND ART

[0002] In serum and tissues of allergic patients, IgE antibodies specific to particular antigens are produced. Physiological consequences caused by interaction between such IgE antibodies and such particular antigens elicit allergic reactions.

[0003] In the process of production of conventional allergy testing agents, antigen reagents are commonly prepared simply by grinding a candidate allergenic food, material or the like (Patent Literature 1). As seen above, conventional antigen reagents do not necessarily contain only a particular antigenic protein inducing an allergic reaction (allergen component), and rather contain different types of protein components. Thus, conventional antigen reagents contain varied amounts of allergen components. For this reason, the only case where conventional allergy tests have permitted detection of a positive allergic reaction is when in a conventional antigen reagent containing many types of proteins, a particular protein acting as an allergen component is present in an amount exceeding a threshold that allows determination of a positive reaction for binding to an IgE antibody. However, no determination of a positive reaction was possible and diagnosis efficiency was not sufficiently high when using a conventional allergy testing agent in patients possessing an IgE antibody binding to an allergen component present in small amounts in an allergen such as food.

[0004] The severity and symptoms of an allergic reaction do not necessarily correlate with the content of an allergen component. Even when a patient's IgE antibody reacts with an allergen component present in trace amounts in a candidate allergic food, material or the like, the allergic reaction may develop allergic symptoms or may affect the severity of those symptoms.

[0005] An attempt to increase the diagnostic efficiency is being made by examining IgE antibodies to components composing a crude antigen to distinguish sensitization that directly contributes to a diagnosis from sensitization based on cross-antigenicity by a pan-allergen or the like. 8 soybean allergens are currently registered to the World Health Organization/International Union of Immunological Societies (WHO/IUIS).

[0006] However, while it is necessary to exhaustively identify allergen components in candidate allergic foods and materials in order to enhance the reliability of allergy tests, the patient detection rate by the measurement of such allergenic components is far insufficient. Identification of novel allergens in soybean is very important not only for increasing the precision of diagnosis, but also for determining targets of therapeutic agents and low allergenic foods.

[0007] Meanwhile, in the field of protein separation and purification, various efforts have conventionally been made to develop methods for separating and purifying a protein or nucleic acid of interest from cell extracts or the like. Such methods may well be exemplified by dialysis based on salt concentration, and centrifugal separation.

[0008] Other efforts have been made to develop many purification methods based on electric charges of protein or nucleic acid residues or on the difference in molecular weight. Electric charge-based purification methods can be exemplified by column chromatography using ion exchange resins, and isoelectric focusing. Purifications based on molecular weight difference can be exemplified by centrifugal separation, molecular-sieve column chromatography, and SDS-PAGE (sodium dodecyl sulfate-polyacrylamide gel electrophoresis).

[0009] In recent years, a method for separating and purifying many different proteins from a small amount of sample has been used, which is more specifically a two-dimensional electrophoresis consisting of isoelectric focusing in the first dimension, followed by SDS-PAGE in the second dimension. The present applicant has conventionally developed some 2D electrophoresis methods with high separation ability (Patent Literature 2-5).

### CITATION LIST

### Patent Literature

[0010] PTL1: Japanese Patent Application Publication No. JP 2002-286716

[0011] PTL2: Japanese Patent Application Publication No. JP 2011-33544

[0012] PTL3: Japanese Patent Application Publication No. JP 2011-33546

[0013] PTL4: Japanese Patent Application Publication No. JP 2011-33547

[0014] PTL5: Japanese Patent Application Publication No. JP 2011-33548

### SUMMARY OF INVENTION

### Technical Problem

[0015] The present invention provides novel antigens of an allergy to soybean. The present invention also provides methods and kits for diagnosing allergy to soybean. The present invention also provides pharmaceutical compositions comprising such an antigen and soybean or processed products of soybean in which such an antigen is eliminated or reduced. The present invention further provides testers for determining the presence or absence of a soybean antigen in an object of interest.

### Solution to Problem

[0016] In order to solve the aforementioned problems, the present inventors had made intensive studies to identify causative antigens of an allergy to soybean. As a result, the inventors succeeded in identifying novel antigens to which an IgE antibody in the serum of a soybean-allergic patient specifically binds. The present invention has been completed based on this finding.

[0017] Thus, in one embodiment, the present invention can be as defined below.

[0018] [1] A kit for diagnosing an allergy to a soybean, the kit comprising, as an antigen, at least one of proteins defined below in any of the following (1) to (8):

(1) (1A) Bowman-Birk type proteinase inhibitor D-II or a variant thereof, which is defined below in any of (1A-a) to (1A-e):

[0019] (1A-a) a protein comprising an amino acid sequence with deletion, substitution, insertion or addition of one or several amino acids in SEQ ID NO: 2;

[0020] (1A-b) a protein comprising an amino acid sequence having at least 70% identity to the amino acid sequence of SEQ ID NO: 2;

[0021] (1A-c) a protein comprising an amino acid sequence encoded by a nucleotide sequence with deletion, substitution, insertion or addition of one or several nucleotides in SEQ ID NO: 1;

[0022] (1A-d) a protein comprising an amino acid sequence encoded by a nucleotide sequence having at least 70% identity to the nucleotide sequence of SEQ ID NO: 1; or

[0023] (1A-e) a protein comprising an amino acid sequence encoded by a nucleic acid that hybridizes under stringent conditions with a nucleic acid having a nucleotide sequence complementary to the nucleotide sequence of SEQ ID NO: 1; or

[0024] (1B) a protein comprising at least one amino acid sequence selected from the group consisting of SEQ ID NOs: 17-20;

(2) (2A) Ribulose bisphosphate carboxylase large chain or a variant thereof, which is defined below in any of (2A-a) to (2A-e):

[0025] (2A-a) a protein comprising an amino acid sequence with deletion, substitution, insertion or addition of one or several amino acids in SEQ ID NO: 4;

[0026] (2A-b) a protein comprising an amino acid sequence having at least 70% identity to the amino acid sequence of SEQ ID NO: 4;

[0027] (2A-c) a protein comprising an amino acid sequence encoded by a nucleotide sequence with deletion, substitution, insertion or addition of one or several nucleotides in SEQ ID NO: 3;

[0028] (2A-d) a protein comprising an amino acid sequence encoded by a nucleotide sequence having at least 70% identity to the nucleotide sequence of SEQ ID NO: 3; or

[0029] (2A-e) a protein comprising an amino acid sequence encoded by a nucleic acid that hybridizes under stringent conditions with a nucleic acid having a nucleotide sequence complementary to the nucleotide sequence of SEQ ID NO: 3; or

[0030] (2B) a protein comprising at least one amino acid sequence selected from the group consisting of SEQ ID NOs: 21-28;

(3) (3A) Gamma-glutamyl hydrolase or a variant thereof, which is defined below in any of (3A-a) to (3A-e):

[0031] (3A-a) a protein comprising an amino acid sequence with deletion, substitution, insertion or addition of one or several amino acids in SEQ ID NO: 6;

[0032] (3A-b) a protein comprising an amino acid sequence having at least 70% identity to the amino acid sequence of SEQ ID NO: 6;

[0033] (3A-c) a protein comprising an amino acid sequence encoded by a nucleotide sequence with deletion, substitution, insertion or addition of one or several nucleotides in SEQ ID NO: 5;

[0034] (3A-d) a protein comprising an amino acid sequence encoded by a nucleotide sequence having at least 70% identity to the nucleotide sequence of SEQ ID NO: 5; or

[0035] (3A-e) a protein comprising an amino acid sequence encoded by a nucleic acid that hybridizes under stringent conditions with a nucleic acid having a nucleotide sequence complementary to the nucleotide sequence of SEQ 1D NO: 5; or

[0036] (3B) a protein comprising an amino acid sequence of SEQ ID NO: 29 or 30;

(4) (4A) Guanine nucleotide-binding protein subunit beta-like protein or a variant thereof, which is defined below in any of (4A-a) to (4A-e):

[0037] (4A-a) a protein comprising an amino acid sequence with deletion, substitution, insertion or addition of one or several amino acids in SEQ ID NO: 8;

[0038] (4A-b) a protein comprising an amino acid sequence having at least 70% identity to the amino acid sequence of SEQ ID NO: 8;

[0039] (4A-c) a protein comprising an amino acid sequence encoded by a nucleotide sequence with deletion, substitution, insertion or addition of one or several nucleotides in SEQ ID NO: 7;

[0040] (4A-d) a protein comprising an amino acid sequence encoded by a nucleotide sequence having at least 70% identity to the nucleotide sequence of SEQ ID NO: 7; or

[0041] (4A-e) a protein comprising an amino acid sequence encoded by a nucleic acid that hybridizes under stringent conditions with a nucleic acid having a nucleotide sequence complementary to the nucleotide sequence of SEQ ID NO: 7; or

[0042] (4B) a protein comprising an amino acid sequence of SEQ ID NO: 31 or 32;

(5) (5A) Protein SLE3 or a variant thereof, which is defined below in any of (5A-a) to (5A-e):

[0043] (5A-a) a protein comprising an amino acid sequence with deletion, substitution, insertion or addition of one or several amino acids in SEQ ID NO: 10;

[0044] (5A-b) a protein comprising an amino acid sequence having at least 70% identity to the amino acid sequence of SEQ ID NO: 10;

[0045] (5A-c) a protein comprising an amino acid sequence encoded by a nucleotide sequence with deletion, substitution, insertion or addition of one or several nucleotides in SEQ ID NO: 9;

[0046] (5A-d) a protein comprising an amino acid sequence encoded by a nucleotide sequence having at least 70% identity to the nucleotide sequence of SEQ ID NO: 9; or

[0047] (5A-e) a protein comprising an amino acid sequence encoded by a nucleic acid that hybridizes under stringent conditions with a nucleic acid having a nucleotide sequence complementary to the nucleotide sequence of SEQ 1D NO: 9; or

[0048] (5B) a protein comprising an amino acid sequence of SEQ ID NO: 33 or 34;

(6) (6A) Seed biotin-containing protein SBP65 or a variant thereof, which is defined below in any of (6A-a) to (6A-e):

[0049] (6A-a) a protein comprising an amino acid sequence with deletion, substitution, insertion or addition of one or several amino acids in SEQ ID NO: 12;

[0050] (6A-b) a protein comprising an amino acid sequence having at least 70% identity to the amino acid sequence of SEQ ID NO: 12;

[0051] (6A-c) a protein comprising an amino acid sequence encoded by a nucleotide sequence with deletion, substitution, insertion or addition of one or several nucleotides in SEQ ID NO: 11;

[0052] (6A-d) a protein comprising an amino acid sequence encoded by a nucleotide sequence having at least 70% identity to the nucleotide sequence of SEQ ID NO: 11; or

[0053] (6A-e) a protein comprising an amino acid sequence encoded by a nucleic acid that hybridizes under stringent conditions with a nucleic acid having a nucleotide sequence complementary to the nucleotide sequence of SEQ ID NO: 11; or

[0054] (6B) a protein comprising at least one amino acid sequence selected from the group consisting of SEQ ID NOs: 35-53;

(7) (7A) Ferritin-2 or a variant thereof, which is defined below in any of (7A-a) to (7A-e):

[0055] (7A-a) a protein comprising an amino acid sequence with deletion, substitution, insertion or addition of one or several amino acids in SEQ ID NO: 14;

[0056] (7A-b) a protein comprising an amino acid sequence having at least 70% identity to the amino acid sequence of SEQ ID NO: 14;

[0057] (7A-c) a protein comprising an amino acid sequence encoded by a nucleotide sequence with deletion, substitution, insertion or addition of one or several nucleotides in SEQ ID NO: 13;

[0058] (7A-d) a protein comprising an amino acid sequence encoded by a nucleotide sequence having at least 70% identity to the nucleotide sequence of SEQ ID NO: 13; or

[0059] (7A-e) a protein comprising an amino acid sequence encoded by a nucleic acid that hybridizes under stringent conditions with a nucleic acid having a nucleotide sequence complementary to the nucleotide sequence of SEQ ID NO: 13; or

[0060] (7B) a protein comprising at least one amino acid sequence selected from the group consisting of SEQ ID NOs: 54-61;

(8) (8A) Cell division cycle protein 48 homolog or a variant thereof, which is defined below in any of (8A-a) to (8A-e):

[0061] (8A-a) a protein comprising an amino acid sequence with deletion, substitution, insertion or addition of one or several amino acids in SEQ ID NO: 16;

[0062] (8A-b) a protein comprising an amino acid sequence having at least 70% identity to the amino acid sequence of SEQ ID NO: 16;

[0063] (8A-c) a protein comprising an amino acid sequence encoded by a nucleotide sequence with deletion, substitution, insertion or addition of one or several nucleotides in SEQ ID NO: 15;

[0064] (8A-d) a protein comprising an amino acid sequence encoded by a nucleotide sequence having at least 70% identity to the nucleotide sequence of SEQ ID NO: 15; or

[0065] (8A-e) a protein comprising an amino acid sequence encoded by a nucleic acid that hybridizes under stringent conditions with a nucleic acid having a nucleotide sequence complementary to the nucleotide sequence of SEQ ID NO: 15; or

[0066] (8B) a protein comprising at least one amino acid sequence selected from the group consisting of SEQ ID NOs: 62-68.

[0067] [2] A composition for diagnosing an allergy to a soybean, comprising, as an antigen, at least one of proteins as defined above in any of (1) to (8) of [1].

[0068] [3] A method for providing an indicator for diagnosing an allergy to a soybean in a subject, the method comprising the steps of:

(i) contacting a sample obtained from the subject with an antigen, wherein the sample is a solution comprising an Ig antibody;
(ii) detecting binding between the IgE antibody present in the sample from the subject and the antigen; and
(iii) when the binding between the IgE antibody in the subject and the antigen is detected, an indicator of the fact that the subject is allergic to a soybean is provided;
wherein the antigen is at least one of proteins as defined above in any of (1) to (8) of [1].

[0069] [4] A pharmaceutical composition comprising at least one of proteins as defined above in any of (1) to (8) of [1].

[0070] [5] The pharmaceutical composition as set forth in [4], wherein the pharmaceutical composition is intended for the treatment of an allergy to a soybean.

[0071] [6] A soybean or processed product of soybean, in which an antigen is eliminated or reduced, wherein antigen is at least one of proteins as defined above in any of (1) to (8) of [1].

[0072] [7] A tester for determining the presence or absence of a soybean antigen in an object of interest, comprising an antibody that binds to at least one of proteins as defined above in any of (1) to (8) of [1].

[0073] [8] A soybean-derived antigen which is at least one of proteins as defined above in any of (1) to (8) of [1] and is causative of an allergy to soybean.

[0074] [9] A kit for diagnosing an allergy to a soybean, the kit comprising, as an antigen, at least one of proteins defined below in any one of (1α) to (55α):

(1α) (1αA1) endoplasmin homolog isoform X2 or a variant thereof, which is defined below in any of (1αA1-a) to (1αA1-e):

[0075] (1αA1-a) a protein comprising an amino acid sequence with deletion, substitution, insertion or addition of one or several amino acids in SEQ ID NO: 70;

[0076] (1αA1-b) a protein comprising an amino acid sequence having at least 70% identity to the amino acid sequence of SEQ ID NO: 70;

[0077] (1αA1-c) a protein comprising an amino acid sequence encoded by a nucleotide sequence with deletion, substitution, insertion or addition of one or several nucleotides in SEQ ID NO: 69;

[0078] (1αA1-d) a protein comprising an amino acid sequence encoded by a nucleotide sequence having at least 70% identity to the nucleotide sequence of SEQ ID NO: 69; or

[0079] (1αA1-e) a protein comprising an amino acid sequence encoded by a nucleic acid that hybridizes under stringent conditions with a nucleic acid having a nucleotide sequence complementary to the nucleotide sequence of SEQ ID NO: 69;

[0080] (1αB1) a protein comprising at least one amino acid sequence selected from the group consisting of SEQ ID NOs: 71-87,

[0081] (1αA2) endoplasmin homolog isoform X2 or a variant thereof, which is defined below in any of (1αA2-a) to (1αA2-e):

[0082] (1αA2-a) a protein comprising an amino acid sequence with deletion, substitution, insertion or addition of one or several amino acids in SEQ ID NO: 89;

[0083] (1αA2-b) a protein comprising an amino acid sequence having at least 70% identity to the amino acid sequence of SEQ ID NO: 89;

[0084] (1αA2-c) a protein comprising an amino acid sequence encoded by a nucleotide sequence with deletion, substitution, insertion or addition of one or several nucleotides in SEQ ID NO: 88;

[0085] (1αA2-d) a protein comprising an amino acid sequence encoded by a nucleotide sequence having at least 70% identity to the nucleotide sequence of SEQ ID NO: 88; or

[0086] (1αA2-e) a protein comprising an amino acid sequence encoded by a nucleic acid that hybridizes under stringent conditions with a nucleic acid having a nucleotide sequence complementary to the nucleotide sequence of SEQ ID NO: 88; or

[0087] (1αB2) a protein comprising at least one amino acid sequence selected from the group consisting of SEQ ID NOs: 90-104;

(2α) (2αA1) heat shock cognate protein 80 or a variant thereof, which is defined below in any of (2αA1-a) to (2αA1-e):

[0088] (2ϵA1-a) a protein comprising an amino acid sequence with deletion, substitution, insertion or addition of one or several amino acids in SEQ ID NO: 106;

[0089] (2αA1-b) a protein comprising an amino acid sequence having at least 70% identity to the amino acid sequence of SEQ ID NO: 106;

[0090] (2αA1-c) a protein comprising an amino acid sequence encoded by a nucleotide sequence with deletion, substitution, insertion or addition of one or several nucleotides in SEQ ID NO: 105;

[0091] (2αA1-d) a protein comprising an amino acid sequence encoded by a nucleotide sequence having at least 70% identity to the nucleotide sequence of SEQ ID NO: 105; or

[0092] (2αA1-e) a protein comprising an amino acid sequence encoded by a nucleic acid that hybridizes under stringent conditions with a nucleic acid having a nucleotide sequence complementary to the nucleotide sequence of SEQ ID NO: 105; or

[0093] (2αB1) a protein comprising at least one amino acid sequence selected from the group consisting of SEQ ID NOs: 107-120;

[0094] (2αA2) heat shock protein 90-1 or a variant thereof, which is defined below in any of (2αA2-a) to (2αA2-e):

[0095] (2αA2-a) a protein comprising an amino acid sequence with deletion, substitution, insertion or addition of one or several amino acids in SEQ ID NO: 122;

[0096] (2αA2-b) a protein comprising an amino acid sequence having at least 70% identity to the amino acid sequence of SEQ ID NO: 122;

[0097] (2αA2-c) a protein comprising an amino acid sequence encoded by a nucleotide sequence with deletion, substitution, insertion or addition of one or several nucleotides in SEQ ID NO: 121;

[0098] (2αA2-d) a protein comprising an amino acid sequence encoded by a nucleotide sequence having at least 70% identity to the nucleotide sequence of SEQ ID NO: 121; or

[0099] (2αA2-e) a protein comprising an amino acid sequence encoded by a nucleic acid that hybridizes under stringent conditions with a nucleic acid having a nucleotide sequence complementary to the nucleotide sequence of SEQ 1D NO: 121; or

[0100] (2αB2) a protein comprising at least one amino acid sequence selected from the group consisting of SEQ ID NOs: 123-137;

[0101] (2αA3) hypothetical protein GLYMA_02G302500 or a variant thereof, which is defined below in any of (2αA3-a) to (2αA3-e):

[0102] (2αA3-a) a protein comprising an amino acid sequence with deletion, substitution, insertion or addition of one or several amino acids in SEQ ID NO: 139;

[0103] (2αA3-b) a protein comprising an amino acid sequence having at least 70% identity to the amino acid sequence of SEQ ID NO: 139;

[0104] (2αA3-c) a protein comprising an amino acid sequence encoded by a nucleotide sequence with deletion, substitution, insertion or addition of one or several nucleotides in SEQ ID NO: 138;

[0105] (2αA3-d) a protein comprising an amino acid sequence encoded by a nucleotide sequence having at least 70% identity to the nucleotide sequence of SEQ ID NO: 138; or

[0106] (2αA3-e) a protein comprising an amino acid sequence encoded by a nucleic acid that hybridizes under stringent conditions with a nucleic acid having a nucleotide sequence complementary to the nucleotide sequence of SEQ ID NO: 138; or

[0107] (2αB3) a protein comprising at least one amino acid sequence selected from the group consisting of SEQ ID NOs: 140-153;

(4α) (4αA) embryo-specific urease isoform X1 or a variant thereof, which is defined below in any of (4αA-a) to (4αA-e):

[0108] (4αA-a) a protein comprising an amino acid sequence with deletion, substitution, insertion or addition of one or several amino acids in SEQ ID NO: 155;

[0109] (4αA-b) a protein comprising an amino acid sequence having at least 70% identity to the amino acid sequence of SEQ ID NO: 155;

[0110] (4αA-c) a protein comprising an amino acid sequence encoded by a nucleotide sequence with deletion, substitution, insertion or addition of one or several nucleotides in SEQ ID NO: 154;

[0111] (4αA-d) a protein comprising an amino acid sequence encoded by a nucleotide sequence having at least 70% identity to the nucleotide sequence of SEQ ID NO: 154; or

[0112] (4αA-e) a protein comprising an amino acid sequence encoded by a nucleic acid that hybridizes under stringent conditions with a nucleic acid having a nucleotide sequence complementary to the nucleotide sequence of SEQ 1D NO: 154; or

[0113] (4αB) a protein comprising at least one amino acid sequence selected from the group consisting of SEQ ID NOs: 156 and 157;

(5α) (5αA) alpha-1,4 glucan phosphorylase L isozyme, chloroplastic/amyloplastic or a variant thereof, which is defined below in any of (5αA-a) to (5αA-e):

[0114] (5αA-a) a protein comprising an amino acid sequence with deletion, substitution, insertion or addition of one or several amino acids in SEQ ID NO: 159;

[0115] (5αA-b) a protein comprising an amino acid sequence having at least 70% identity to the amino acid sequence of SEQ ID NO: 159;

[0116] (5αA-c) a protein comprising an amino acid sequence encoded by a nucleotide sequence with deletion, substitution, insertion or addition of one or several nucleotides in SEQ ID NO: 158;

[0117] (5αA-d) a protein comprising an amino acid sequence encoded by a nucleotide sequence having at least 70% identity to the nucleotide sequence of SEQ ID NO: 158; or

[0118] (5αA-e) a protein comprising an amino acid sequence encoded by a nucleic acid that hybridizes under stringent conditions with a nucleic acid having a nucleotide sequence complementary to the nucleotide sequence of SEQ ID NO: 158; or

[0119] (5αB) a protein comprising at least one amino acid sequence selected from the group consisting of SEQ ID NOs: 160 and 161;

(6α) (6αA1) aconitate hydratase 1 or a variant thereof, which is defined below in any of (6αA1-a) to (6αA1-e):

[0120] (6αA1-a) a protein comprising an amino acid sequence with deletion, substitution, insertion or addition of one or several amino acids in SEQ ID NO: 163;

[0121] (6αA1-b) a protein comprising an amino acid sequence having at least 70% identity to the amino acid sequence of SEQ ID NO: 163;

[0122] (6αA1-c) a protein comprising an amino acid sequence encoded by a nucleotide sequence with deletion, substitution, insertion or addition of one or several nucleotides in SEQ ID NO: 162;

[0123] (6αA1-d) a protein comprising an amino acid sequence encoded by a nucleotide sequence having at least 70% identity to the nucleotide sequence of SEQ ID NO: 162; or

[0124] (6αA1-e) a protein comprising an amino acid sequence encoded by a nucleic acid that hybridizes under stringent conditions with a nucleic acid having a nucleotide sequence complementary to the nucleotide sequence of SEQ 1D NO: 162;

[0125] (6αB1) a protein comprising at least one amino acid sequence selected from the group consisting of SEQ ID NOs: 164-167; or

[0126] (6αA2) aconitate hydratase 1 or a variant thereof, which is defined below in any of (6αA2-a) to (6αA2-e):

[0127] (6αA2-a) a protein comprising an amino acid sequence with deletion, substitution, insertion or addition of one or several amino acids in SEQ ID NO: 169;

[0128] (6αA2-b) a protein comprising an amino acid sequence having at least 70% identity to the amino acid sequence of SEQ ID NO: 169;

[0129] (6αA2-c) a protein comprising an amino acid sequence encoded by a nucleotide sequence with deletion, substitution, insertion or addition of one or several nucleotides in SEQ ID NO: 168;

[0130] (6αA2-d) a protein comprising an amino acid sequence encoded by a nucleotide sequence having at least 70% identity to the nucleotide sequence of SEQ ID NO: 168; or

[0131] (6αA2-e) a protein comprising an amino acid sequence encoded by a nucleic acid that hybridizes under stringent conditions with a nucleic acid having a nucleotide sequence complementary to the nucleotide sequence of SEQ ID NO: 168; or

[0132] (6αB2) a protein comprising at least one amino acid sequence selected from the group consisting of SEQ ID NOs: 170-172;

(7α) (7αA) methionine synthase or a variant thereof, which is defined below in any of (7αA-a) to (7αA-e):

[0133] (7αA-a) a protein comprising an amino acid sequence with deletion, substitution, insertion or addition of one or several amino acids in SEQ ID NO: 174;

[0134] (7αA-b) a protein comprising an amino acid sequence having at least 70% identity to the amino acid sequence of SEQ ID NO: 174;

[0135] (7αA-c) a protein comprising an amino acid sequence encoded by a nucleotide sequence with deletion, substitution, insertion or addition of one or several nucleotides in SEQ ID NO: 173;

[0136] (7αA-d) a protein comprising an amino acid sequence encoded by a nucleotide sequence having at least 70% identity to the nucleotide sequence of SEQ ID NO: 173; or

[0137] (7αA-e) a protein comprising an amino acid sequence encoded by a nucleic acid that hybridizes under stringent conditions with a nucleic acid having a nucleotide sequence complementary to the nucleotide sequence of SEQ ID NO: 173; or

[0138] (7αB) a protein comprising at least one amino acid sequence selected from the group consisting of SEQ ID NOs: 175-187;

(8α) (8αA) transketolase, chloroplastic or a variant thereof, which is defined below in any of (8αA-a) to (8αA-e):

[0139] (8αA-a) a protein comprising an amino acid sequence with deletion, substitution, insertion or addition of one or several amino acids in SEQ ID NO: 189;

[0140] (8αA-b) a protein comprising an amino acid sequence having at least 70% identity to the amino acid sequence of SEQ ID NO: 189;

[0141] (8αA-c) a protein comprising an amino acid sequence encoded by a nucleotide sequence with deletion, substitution, insertion or addition of one or several nucleotides in SEQ ID NO: 188;

[0142] (8αA-d) a protein comprising an amino acid sequence encoded by a nucleotide sequence having at least 70% identity to the nucleotide sequence of SEQ ID NO: 188; or

[0143] (8αA-e) a protein comprising an amino acid sequence encoded by a nucleic acid that hybridizes under stringent conditions with a nucleic acid having a nucleotide sequence complementary to the nucleotide sequence of SEQ 1D NO: 188; or

[0144] (8αB) a protein comprising at least one amino acid sequence selected from the group consisting of SEQ ID NOs: 190-199;

(9α) (9αA) lysine-tRNA ligase, cytoplasmic-like isoform X2 or a variant thereof, which is defined below in any of (9αA-a) to (9αA-e):

[0145] (9αA-a) a protein comprising an amino acid sequence with deletion, substitution, insertion or addition of one or several amino acids in SEQ ID NO: 201;

[0146] (9αA-b) a protein comprising an amino acid sequence having at least 70% identity to the amino acid sequence of SEQ ID NO: 201;

[0147] (9αA-c) a protein comprising an amino acid sequence encoded by a nucleotide sequence with deletion, substitution, insertion or addition of one or several nucleotides in SEQ ID NO: 200;

[0148] (9αA-d) a protein comprising an amino acid sequence encoded by a nucleotide sequence having at least 70% identity to the nucleotide sequence of SEQ ID NO: 200; or

[0149] (9αA-e) a protein comprising an amino acid sequence encoded by a nucleic acid that hybridizes under stringent conditions with a nucleic acid having a nucleotide sequence complementary to the nucleotide sequence of SEQ ID NO: 200; or

[0150] (9αB) a protein comprising an amino acid sequence of SEQ ID NO: 202;

(10α) (10ϵA1) chaperonin CPN60-2, mitochondrial or a variant thereof, which is dermed below in any of (10αA1-a) to (10αA1-e):

[0151] (10αA1-a) a protein comprising an amino acid sequence with deletion, substitution, insertion or addition of one or several amino acids in SEQ ID NO: 204;

[0152] (10αA1-b) a protein comprising an amino acid sequence having at least 70% identity to the amino acid sequence of SEQ ID NO: 204;

[0153] (10ϵA1-c) a protein comprising an amino acid sequence encoded by a nucleotide sequence with deletion, substitution, insertion or addition of one or several nucleotides in SEQ ID NO: 203;

[0154] (10αA1-d) a protein comprising an amino acid sequence encoded by a nucleotide sequence having at least 70% identity to the nucleotide sequence of SEQ ID NO: 203; or

[0155] (10αA1-e) a protein comprising an amino acid sequence encoded by a nucleic acid that hybridizes under stringent conditions with a nucleic acid having a nucleotide sequence complementary to the nucleotide sequence of SEQ ID NO: 203;

[0156] (10αB1) a protein comprising at least one amino acid sequence selected from the group consisting of SEQ ID NOs: 205-218;

[0157] (10αA2) chaperonin CPN60-2, mitochondrial-like isoform X1 or a variant thereof, which is defined below in any of (10αA2-a) to (10αA2-e):

[0158] (10αA2-a) a protein comprising an amino acid sequence with deletion, substitution, insertion or addition of one or several amino acids in SEQ ID NO: 220;

[0159] (10αA2-b) a protein comprising an amino acid sequence having at least 70% identity to the amino acid sequence of SEQ ID NO: 220;

[0160] (10αA2-c) a protein comprising an amino acid sequence encoded by a nucleotide sequence with deletion, substitution, insertion or addition of one or several nucleotides in SEQ ID NO: 219;

[0161] (10αA2-d) a protein comprising an amino acid sequence encoded by a nucleotide sequence having at least 70% identity to the nucleotide sequence of SEQ ID NO: 219; or

[0162] (10αA2-e) a protein comprising an amino acid sequence encoded by a nucleic acid that hybridizes under stringent conditions with a nucleic acid having a nucleotide sequence complementary to the nucleotide sequence of SEQ ID NO: 219; or

[0163] (10αB2) a protein comprising at least one amino acid sequence selected from the group consisting of SEQ ID NOs: 221-231;

(11α) (11αA) polyadenylate-binding protein 8 isoform X3 or a variant thereof, which is defined below in any of (11αA-a) to (11αA-e):

[0164] (11αA-a) a protein comprising an amino acid sequence with deletion, substitution, insertion or addition of one or several amino acids in SEQ ID NO: 233;

[0165] (11αA-b) a protein comprising an amino acid sequence having at least 70% identity to the amino acid sequence of SEQ ID NO: 233;

[0166] (11αA-c) a protein comprising an amino acid sequence encoded by a nucleotide sequence with deletion, substitution, insertion or addition of one or several nucleotides in SEQ ID NO: 232;

[0167] (11αA-d) a protein comprising an amino acid sequence encoded by a nucleotide sequence having at least 70% identity to the nucleotide sequence of SEQ ID NO: 232; or

[0168] (11αA-e) a protein comprising an amino acid sequence encoded by a nucleic acid that hybridizes under stringent conditions with a nucleic acid having a nucleotide sequence complementary to the nucleotide sequence of SEQ ID NO: 232; or

[0169] (11αB) a protein comprising at least one amino acid sequence selected from the group consisting of SEQ ID NOs: 234-237;

(12α) (122αA) pyrophosphate-fructose 6-phosphate 1-phosphotransferase subunit alpha-like or a variant thereof, which is defined below in any of (12αA-a) to (12αA-e):

[0170] (12αA-a) a protein comprising an amino acid sequence with deletion, substitution, insertion or addition of one or several amino acids in SEQ ID NO: 239;

[0171] (12αA-b) a protein comprising an amino acid sequence having at least 70% identity to the amino acid sequence of SEQ ID NO: 239;

[0172] (12αA-c) a protein comprising an amino acid sequence encoded by a nucleotide sequence with deletion, substitution, insertion or addition of one or several nucleotides in SEQ ID NO: 238;

[0173] (12αA-d) a protein comprising an amino acid sequence encoded by a nucleotide sequence having at least 70% identity to the nucleotide sequence of SEQ ID NO: 238; or

[0174] (12αA-e) a protein comprising an amino acid sequence encoded by a nucleic acid that hybridizes under stringent conditions with a nucleic acid having a nucleotide sequence complementary to the nucleotide sequence of SEQ ID NO: 238; or

[0175] (12αB) a protein comprising an amino acid sequence of SEQ ID NO: 240;

(13α) (13αA1) protein disulfide isomerase-like protein precursor or a variant thereof, which is defined below in any of (13αA1-a) to (13αA1-e):

[0176] (13αA1-a) a protein comprising an amino acid sequence with deletion, substitution, insertion or addition of one or several amino acids in SEQ ID NO: 242;

[0177] (13αA1-b) a protein comprising an amino acid sequence having at least 70% identity to the amino acid sequence of SEQ ID NO: 242;

[0178] (13αA1-c) a protein comprising an amino acid sequence encoded by a nucleotide sequence with deletion, substitution, insertion or addition of one or several nucleotides in SEQ ID NO: 241;

[0179] (13αA1-d) a protein comprising an amino acid sequence encoded by a nucleotide sequence having at least 70% identity to the nucleotide sequence of SEQ ID NO: 241; or

[0180] (13αA1-e) a protein comprising an amino acid sequence encoded by a nucleic acid that hybridizes under stringent conditions with a nucleic acid having a nucleotide sequence complementary to the nucleotide sequence of SEQ ID NO: 241;

[0181] (13αB1) a protein comprising at least one amino acid sequence selected from the group consisting of SEQ ID NOs: 243-252;

[0182] (13αA2) protein disulfide-isomerase or a variant thereof, which is defined below in any of (13αA2-a) to (13αA2-e):

[0183] (13αA2-a) a protein comprising an amino acid sequence with deletion, substitution, insertion or addition of one or several amino acids in SEQ ID NO: 254;

[0184] (13αA2-b) a protein comprising an amino acid sequence having at least 70% identity to the amino acid sequence of SEQ ID NO: 254;

[0185] (13αA2-c) a protein comprising an amino acid sequence encoded by a nucleotide sequence with deletion, substitution, insertion or addition of one or several nucleotides in SEQ ID NO: 253;

[0186] (13αA2-d) a protein comprising an amino acid sequence encoded by a nucleotide sequence having at least 70% identity to the nucleotide sequence of SEQ ID NO: 253; or

[0187] (13αA2-e) a protein comprising an amino acid sequence encoded by a nucleic acid that hybridizes under stringent conditions with a nucleic acid having a nucleotide sequence complementary to the nucleotide sequence of SEQ 1D NO: 253; or

[0188] (13αB2) a protein comprising at least one amino acid sequence selected from the group consisting of SEQ ID NOs: 255-278;

(14α) (14αA1) V-type proton ATPase subunit B 2 or a variant thereof, which is defined below in any of (14αA1-a) to (14αA1-e):

[0189] (14αA1-a) a protein comprising an amino acid sequence with deletion, substitution, insertion or addition of one or several amino acids in SEQ ID NO: 280;

[0190] (14αA1-b) a protein comprising an amino acid sequence having at least 70% identity to the amino acid sequence of SEQ ID NO: 280;

[0191] (14αA1-c) a protein comprising an amino acid sequence encoded by a nucleotide sequence with deletion, substitution, insertion or addition of one or several nucleotides in SEQ ID NO: 279;

[0192] (14αA1-d) a protein comprising an amino acid sequence encoded by a nucleotide sequence having at least 70% identity to the nucleotide sequence of SEQ ID NO: 279; or

[0193] (14αA1-e) a protein comprising an amino acid sequence encoded by a nucleic acid that hybridizes under stringent conditions with a nucleic acid having a nucleotide sequence complementary to the nucleotide sequence of SEQ ID NO: 279;

[0194] (14αB1) a protein comprising at least one amino acid sequence selected from the group consisting of SEQ ID NOs: 281-284;

[0195] (14αA2) V-type proton ATPase subunit B 2 or a variant thereof, which is defined below in any of (14αA2-a) to (14αA2-e):

[0196] (14αA2-a) a protein comprising an amino acid sequence with deletion, substitution, insertion or addition of one or several amino acids in SEQ ID NO: 286;

[0197] (14αA2-b) a protein comprising an amino acid sequence having at least 70% identity to the amino acid sequence of SEQ ID NO: 286;

[0198] (14αA2-c) a protein comprising an amino acid sequence encoded by a nucleotide sequence with deletion, substitution, insertion or addition of one or several nucleotides in SEQ ID NO: 285;

[0199] (14αA2-d) a protein comprising an amino acid sequence encoded by a nucleotide sequence having at least 70% identity to the nucleotide sequence of SEQ ID NO: 285; or

[0200] (14αA2-e) a protein comprising an amino acid sequence encoded by a nucleic acid that hybridizes under stringent conditions with a nucleic acid having a nucleotide sequence complementary to the nucleotide sequence of SEQ 1D NO: 285; or

[0201] (14αB2) a protein comprising at least one amino acid sequence selected from the group consisting of SEQ ID NOs: 287-289;

(15, 16α) (15, 16αA1) UTP-glucose-1-phosphate uridylyltransferase or a variant thereof, which is defined below in any of (15, 16αA1-a) to (15, 16αA1-e):

[0202] (15, 16αA1-a) a protein comprising an amino acid sequence with deletion, substitution, insertion or addition of one or several amino acids in SEQ ID NO: 291;

[0203] (15, 16αA1-b) a protein comprising an amino acid sequence having at least 70% identity to the amino acid sequence of SEQ ID NO: 291;

[0204] (15, 16αA1-c) a protein comprising an amino acid sequence encoded by a nucleotide sequence with deletion, substitution, insertion or addition of one or several nucleotides in SEQ ID NO: 290;

[0205] (15, 16αA1-d) a protein comprising an amino acid sequence encoded by a nucleotide sequence having at least 70% identity to the nucleotide sequence of SEQ ID NO: 290; or

[0206] (15, 16αA1-e) a protein comprising an amino acid sequence encoded by a nucleic acid that hybridizes under stringent conditions with a nucleic acid having a nucleotide sequence complementary to the nucleotide sequence of SEQ ID NO: 290;

[0207] (15, 16αB1) a protein comprising at least one amino acid sequence selected from the group consisting of SEQ ID NOs: 292-304;

[0208] (15, 16αA2) hypothetical protein GLYMA_02G241100 or a variant thereof, which is defined below in any of (15, 16αA2-a) to (15, 16αA2-e):

[0209] (15, 16αA2-a) a protein comprising an amino acid sequence with deletion, substitution, insertion or addition of one or several amino acids in SEQ ID NO: 306;

[0210] (15, 16αA2-b) a protein comprising an amino acid sequence having at least 70% identity to the amino acid sequence of SEQ ID NO: 306;

[0211] (15, 16αA2-c) a protein comprising an amino acid sequence encoded by a nucleotide sequence with deletion, substitution, insertion or addition of one or several nucleotides in SEQ ID NO: 305;

[0212] (15, 16αA2-d) a protein comprising an amino acid sequence encoded by a nucleotide sequence having at least 70% identity to the nucleotide sequence of SEQ ID NO: 305; or

[0213] (15, 16αA2-e) a protein comprising an amino acid sequence encoded by a nucleic acid that hybridizes under stringent conditions with a nucleic acid having a nucleotide sequence complementary to the nucleotide sequence of SEQ ID NO: 305; or

[0214] (15, 16αB2) a protein comprising at least one amino acid sequence selected from the group consisting of SEQ ID NOs: 307-318;

(17α) (17αA1) guanosine nucleotide diphosphate dissociation inhibitor 2 or a variant thereof, which is defined below in any of (17αA1-a) to (17αA1-e):

[0215] (17αA1-a) a protein comprising an amino acid sequence with deletion, substitution, insertion or addition of one or several amino acids in SEQ ID NO: 320;

[0216] (17αA1-b) a protein comprising an amino acid sequence having at least 70% identity to the amino acid sequence of SEQ ID NO: 320;

[0217] (17αA1-c) a protein comprising an amino acid sequence encoded by a nucleotide sequence with deletion, substitution, insertion or addition of one or several nucleotides in SEQ ID NO: 319;

[0218] (17αA1-d) a protein comprising an amino acid sequence encoded by a nucleotide sequence having at least 70% identity to the nucleotide sequence of SEQ ID NO: 319; or

[0219] (17αA1-e) a protein comprising an amino acid sequence encoded by a nucleic acid that hybridizes under stringent conditions with a nucleic acid having a nucleotide sequence complementary to the nucleotide sequence of SEQ ID NO: 319;

[0220] (17αB1) a protein comprising at least one amino acid sequence selected from the group consisting of SEQ ID NOs: 321-325;

[0221] (17αA2) rab GDP dissociation inhibitor alpha-like or a variant thereof, which is defined below in any of (17αA2-a) to (17αA2-e):

[0222] (17αA2-a) a protein comprising an amino acid sequence with deletion, substitution, insertion or addition of one or several amino acids in SEQ ID NO: 327;

[0223] (17αA2-b) a protein comprising an amino acid sequence having at least 70% identity to the amino acid sequence of SEQ ID NO: 327;

[0224] (17αA2-c) a protein comprising an amino acid sequence encoded by a nucleotide sequence with deletion, substitution, insertion or addition of one or several nucleotides in SEQ ID NO: 326;

[0225] (17αA2-d) a protein comprising an amino acid sequence encoded by a nucleotide sequence having at least 70% identity to the nucleotide sequence of SEQ ID NO: 326; or

[0226] (17αA2-e) a protein comprising an amino acid sequence encoded by a nucleic acid that hybridizes under stringent conditions with a nucleic acid having a nucleotide sequence complementary to the nucleotide sequence of SEQ ID NO: 326; or

[0227] (17αB2) a protein comprising at least one amino acid sequence selected from the group consisting of SEQ ID NOs: 328-332;

(18α) (188αA) hypothetical protein GLYMA_10G028300 or a variant thereof, which is defined below in any of (18αA-a) to (18αA-e):

[0228] (18αA-a) a protein comprising an amino acid sequence with deletion, substitution, insertion or addition of one or several amino acids in SEQ ID NO: 334;

[0229] (18αA-b) a protein comprising an amino acid sequence having at least 70% identity to the amino acid sequence of SEQ ID NO: 334;

[0230] (18αA-c) a protein comprising an amino acid sequence encoded by a nucleotide sequence with deletion, substitution, insertion or addition of one or several nucleotides in SEQ ID NO: 333;

[0231] (18αA-d) a protein comprising an amino acid sequence encoded by a nucleotide sequence having at least 70% identity to the nucleotide sequence of SEQ ID NO: 333; or

[0232] (18αA-e) a protein comprising an amino acid sequence encoded by a nucleic acid that hybridizes under stringent conditions with a nucleic acid having a nucleotide sequence complementary to the nucleotide sequence of SEQ 1D NO: 333; or

[0233] (18αB) a protein comprising at least one amino acid sequence selected from the group consisting of SEQ ID NOs: 335-339;

(19α) (19αA) sucrose binding protein homolog S-64 or a variant thereof, which is defined below in any of (19αA-a) to (19αA-e):

[0234] (19αA-a) a protein comprising an amino acid sequence with deletion, substitution, insertion or addition of one or several amino acids in SEQ ID NO: 341;

[0235] (19αA-b) a protein comprising an amino acid sequence having at least 70% identity to the amino acid sequence of SEQ ID NO: 341;

[0236] (19αA-c) a protein comprising an amino acid sequence encoded by a nucleotide sequence with deletion, substitution, insertion or addition of one or several nucleotides in SEQ ID NO: 340;

[0237] (19αA-d) a protein comprising an amino acid sequence encoded by a nucleotide sequence having at least 70% identity to the nucleotide sequence of SEQ ID NO: 340; or

[0238] (19αA-e) a protein comprising an amino acid sequence encoded by a nucleic acid that hybridizes under stringent conditions with a nucleic acid having a nucleotide sequence complementary to the nucleotide sequence of SEQ ID NO: 340; or

[0239] (19αB) a protein comprising at least one amino acid sequence selected from the group consisting of SEQ ID NOs: 342-346;

(25α) (25αA1) succinyl-CoA ligase [ADP-forming] subunit beta, mitochondrial or a variant thereof, which is defined below in any of (25αA1-a) to (25αA1-e):

[0240] (25αA1-a) a protein comprising an amino acid sequence with deletion, substitution, insertion or addition of one or several amino acids in SEQ ID NO: 348;

[0241] (25αA1-b) a protein comprising an amino acid sequence having at least 70% identity to the amino acid sequence of SEQ ID NO: 348;

[0242] (25αA1-c) a protein comprising an amino acid sequence encoded by a nucleotide sequence with deletion, substitution, insertion or addition of one or several nucleotides in SEQ ID NO: 347;

[0243] (25αA1-d) a protein comprising an amino acid sequence encoded by a nucleotide sequence having at least 70% identity to the nucleotide sequence of SEQ ID NO: 347; or

[0244] (25αA1-e) a protein comprising an amino acid sequence encoded by a nucleic acid that hybridizes under stringent conditions with a nucleic acid having a nucleotide sequence complementary to the nucleotide sequence of SEQ 1D NO: 347;

[0245] (25αB1) a protein comprising at least one amino acid sequence selected from the group consisting of SEQ ID NOs: 349-356;

[0246] (25αA2) succinyl-CoA ligase [ADP-forming] subunit beta, mitochondrial or a variant thereof, which is defined below in any of (25αA2-a) to (25αA2-e):

[0247] (25αA2-a) a protein comprising an amino acid sequence with deletion, substitution, insertion or addition of one or several amino acids in SEQ ID NO: 358;

[0248] (25αA2-b) a protein comprising an amino acid sequence having at least 70% identity to the amino acid sequence of SEQ ID NO: 358;

[0249] (25αA2-c) a protein comprising an amino acid sequence encoded by a nucleotide sequence with deletion, substitution, insertion or addition of one or several nucleotides in SEQ ID NO: 357;

[0250] (25αA2-d) a protein comprising an amino acid sequence encoded by a nucleotide sequence having at least 70% identity to the nucleotide sequence of SEQ ID NO: 357; or

[0251] (25αA2-e) a protein comprising an amino acid sequence encoded by a nucleic acid that hybridizes under stringent conditions with a nucleic acid having a nucleotide sequence complementary to the nucleotide sequence of SEQ ID NO: 357; or

[0252] (25αB2) a protein comprising at least one amino acid sequence selected from the group consisting of SEQ ID NOs: 359-365;

(26α) (26αA1) phosphoglycerate kinase, cytosolic or a variant thereof, which is defined below in any of (26αA1-a) to (26αA1-e):

[0253] (26αA1-a) a protein comprising an amino acid sequence with deletion, substitution, insertion or addition of one or several amino acids in SEQ ID NO: 367;

[0254] (26αA1-b) a protein comprising an amino acid sequence having at least 70% identity to the amino acid sequence of SEQ ID NO: 367;

[0255] (26αA1-c) a protein comprising an amino acid sequence encoded by a nucleotide sequence with deletion, substitution, insertion or addition of one or several nucleotides in SEQ ID NO: 366;

[0256] (26αA1-d) a protein comprising an amino acid sequence encoded by a nucleotide sequence having at least 70% identity to the nucleotide sequence of SEQ ID NO: 366; or

[0257] (26αA1-e) a protein comprising an amino acid sequence encoded by a nucleic acid that hybridizes under stringent conditions with a nucleic acid having a nucleotide sequence complementary to the nucleotide sequence of SEQ 1D NO: 366;

[0258] (26αB1) a protein comprising at least one amino acid sequence selected from the group consisting of SEQ ID NOs: 368-382;

[0259] (26αA2) phosphoglycerate kinase, cytosolic or a variant thereof, which is defined below in any of (26αA2-a) to (26αA2-e):

[0260] (26αA2-a) a protein comprising an amino acid sequence with deletion, substitution, insertion or addition of one or several amino acids in SEQ ID NO: 384;

[0261] (26αA2-b) a protein comprising an amino acid sequence having at least 70% identity to the amino acid sequence of SEQ ID NO: 384;

[0262] (26αA2-c) a protein comprising an amino acid sequence encoded by a nucleotide sequence with deletion, substitution, insertion or addition of one or several nucleotides in SEQ ID NO: 383;

[0263] (26αA2-d) a protein comprising an amino acid sequence encoded by a nucleotide sequence having at least 70% identity to the nucleotide sequence of SEQ ID NO: 383; or

[0264] (26αA2-e) a protein comprising an amino acid sequence encoded by a nucleic acid that hybridizes under stringent conditions with a nucleic acid having a nucleotide sequence complementary to the nucleotide sequence of SEQ ID NO: 383;

[0265] (26αB2) a protein comprising at least one amino acid sequence selected from the group consisting of SEQ ID NOs: 385-392;

[0266] (26αA3) phosphoglycerate kinase, cytosolic or a variant thereof, which is defined below in any of (26αA3-a) to (26αA3-e): (26αA3-a) a protein comprising an amino acid sequence with deletion, substitution, insertion or addition of one or several amino acids in SEQ ID NO: 394;

[0267] (26αA3-b) a protein comprising an amino acid sequence having at least 70% identity to the amino acid sequence of SEQ ID NO: 394;

[0268] (26αA3-c) a protein comprising an amino acid sequence encoded by a nucleotide sequence with deletion, substitution, insertion or addition of one or several nucleotides in SEQ ID NO: 393;

[0269] (26αA3-d) a protein comprising an amino acid sequence encoded by a nucleotide sequence having at least 70% identity to the nucleotide sequence of SEQ ID NO: 393; or

[0270] (26αA3-e) a protein comprising an amino acid sequence encoded by a nucleic acid that hybridizes under stringent conditions with a nucleic acid having a nucleotide sequence complementary to the nucleotide sequence of SEQ ID NO: 393; or

[0271] (26αB3) a protein comprising at least one amino acid sequence selected from the group consisting of SEQ ID NOs: 395-409;

(27α) (27αA1) alcohol dehydrogenase 1 or a variant thereof, which is defined below in any of (27αA1-a) to (27αA1-e):

[0272] (27αA11-a) a protein comprising an amino acid sequence with deletion, substitution, insertion or addition of one or several amino acids in SEQ ID NO: 411;

[0273] (27αA11-b) a protein comprising an amino acid sequence having at least 70% identity to the amino acid sequence of SEQ ID NO: 411;

[0274] (27αA11-c) a protein comprising an amino acid sequence encoded by a nucleotide sequence with deletion, substitution, insertion or addition of one or several nucleotides in SEQ ID NO: 410;

[0275] (27αA1-d) a protein comprising an amino acid sequence encoded by a nucleotide sequence having at least 70% identity to the nucleotide sequence of SEQ ID NO: 410; or

[0276] (27αA1-e) a protein comprising an amino acid sequence encoded by a nucleic acid that hybridizes under stringent conditions with a nucleic acid having a nucleotide sequence complementary to the nucleotide sequence of SEQ 1D NO: 410;

[0277] (27αB1) a protein comprising at least one amino acid sequence selected from the group consisting of SEQ ID NOs: 412-416;

[0278] (27αA2) alcohol dehydrogenase 1 or a variant thereof, which is defined below in any of (27αA2-a) to (27αA2-e):

[0279] (27αA2-a) a protein comprising an amino acid sequence with deletion, substitution, insertion or addition of one or several amino acids in SEQ ID NO: 418;

[0280] (27αA2-b) a protein comprising an amino acid sequence having at least 70% identity to the amino acid sequence of SEQ ID NO: 418;

[0281] (27αA2-c) a protein comprising an amino acid sequence encoded by a nucleotide sequence with deletion, substitution, insertion or addition of one or several nucleotides in SEQ ID NO: 417;

[0282] (27αA2-d) a protein comprising an amino acid sequence encoded by a nucleotide sequence having at least 70% identity to the nucleotide sequence of SEQ ID NO: 417; or

[0283] (27αA2-e) a protein comprising an amino acid sequence encoded by a nucleic acid that hybridizes under stringent conditions with a nucleic acid having a nucleotide sequence complementary to the nucleotide sequence of SEQ ID NO: 417;

[0284] (27αB2) a protein comprising at least one amino acid sequence selected from the group consisting of SEQ ID NOs: 419 and 420;

[0285] (27αA3) alcohol dehydrogenase 1-like or a variant thereof, which is defined below in any of (27αA3-a) to (27αA3-e):

[0286] (27αA3-a) a protein comprising an amino acid sequence with deletion, substitution, insertion or addition of one or several amino acids in SEQ ID NO: 422;

[0287] (27αA3-b) a protein comprising an amino acid sequence having at least 70% identity to the amino acid sequence of SEQ ID NO: 422;

[0288] (27αA3-c) a protein comprising an amino acid sequence encoded by a nucleotide sequence with deletion, substitution, insertion or addition of one or several nucleotides in SEQ ID NO: 421;

[0289] (27αA3-d) a protein comprising an amino acid sequence encoded by a nucleotide sequence having at least 70% identity to the nucleotide sequence of SEQ ID NO: 421; or

[0290] (27αA3-e) a protein comprising an amino acid sequence encoded by a nucleic acid that hybridizes under stringent conditions with a nucleic acid having a nucleotide sequence complementary to the nucleotide sequence of SEQ 1D NO: 421; or

[0291] (27αB3) a protein comprising at least one amino acid sequence selected from the group consisting of SEQ ID NOs: 423-427;

(28α) (28αA) 35 kDa seed maturation protein isoform X1 or a variant thereof, which is defined below in any of (28αA-a) to (28αA-e):

[0292] (28αA-a) a protein comprising an amino acid sequence with deletion, substitution, insertion or addition of one or several amino acids in SEQ ID NO: 429;

[0293] (28αA-b) a protein comprising an amino acid sequence having at least 70% identity to the amino acid sequence of SEQ ID NO: 429;

[0294] (28αA-c) a protein comprising an amino acid sequence encoded by a nucleotide sequence with deletion, substitution, insertion or addition of one or several nucleotides in SEQ ID NO: 428;

[0295] (28αA-d) a protein comprising an amino acid sequence encoded by a nucleotide sequence having at least 70% identity to the nucleotide sequence of SEQ ID NO: 428; or

[0296] (28αA-e) a protein comprising an amino acid sequence encoded by a nucleic acid that hybridizes under stringent conditions with a nucleic acid having a nucleotide sequence complementary to the nucleotide sequence of SEQ ID NO: 428; or

[0297] (28α) a protein comprising at least one amino acid sequence selected from the group consisting of SEQ ID NOs: 430-433;

(29-33α) (29-33αA1) glyceraldehyde-3-phosphate dehydrogenase isoform X1 or a variant thereof, which is defined below in any of (29-33αA1-a) to (29-33αA1-e):

[0298] (29-33αA1-a) a protein comprising an amino acid sequence with deletion, substitution, insertion or addition of one or several amino acids in SEQ ID NO: 435;

[0299] (29-33αA1-b) a protein comprising an amino acid sequence having at least 70% identity to the amino acid sequence of SEQ ID NO: 435;

[0300] (29-33αA1-c) a protein comprising an amino acid sequence encoded by a nucleotide sequence with deletion, substitution, insertion or addition of one or several nucleotides in SEQ ID NO: 434;

[0301] (29-33αA1-d) a protein comprising an amino acid sequence encoded by a nucleotide sequence having at least 70% identity to the nucleotide sequence of SEQ ID NO: 434; or

[0302] (29-33αA1-e) a protein comprising an amino acid sequence encoded by a nucleic acid that hybridizes under stringent conditions with a nucleic acid having a nucleotide sequence complementary to the nucleotide sequence of SEQ ID NO: 434;

[0303] (29-33αB1) a protein comprising at least one amino acid sequence selected from the group consisting of SEQ ID NOs: 436-439;

[0304] (29-33αA2) glyceraldehyde-3-phosphate dehydrogenase, cytosolic or a variant thereof, which is defined below in any of (29-33αA2-a) to (29-33αA2-e):

[0305] (29-33αA2-a) a protein comprising an amino acid sequence with deletion, substitution, insertion or addition of one or several amino acids in SEQ ID NO: 441;

[0306] (29-33αA2-b) a protein comprising an amino acid sequence having at least 70% identity to the amino acid sequence of SEQ ID NO: 441;

[0307] (29-33αA2-c) a protein comprising an amino acid sequence encoded by a nucleotide sequence with deletion, substitution, insertion or addition of one or several nucleotides in SEQ ID NO: 440;

[0308] (29-33αA2-d) a protein comprising an amino acid sequence encoded by a nucleotide sequence having at least 70% identity to the nucleotide sequence of SEQ ID NO: 440; or

[0309] (29-33αA2-e) a protein comprising an amino acid sequence encoded by a nucleic acid that hybridizes under stringent conditions with a nucleic acid having a nucleotide sequence complementary to the nucleotide sequence of SEQ ID NO: 440;

[0310] (29-33αB2) a protein comprising at least one amino acid sequence selected from the group consisting of SEQ ID NOs: 442-445;

[0311] (29-33αA3) uncharacterized protein LOC100782924 or a variant thereof, which is defined below in any of (29-33αA3-a) to (29-33αA3-e):

[0312] (29-33αA3-a) a protein comprising an amino acid sequence with deletion, substitution, insertion or addition of one or several amino acids in SEQ ID NO: 447;

[0313] (29-33αA3-b) a protein comprising an amino acid sequence having at least 70% identity to the amino acid sequence of SEQ ID NO: 447;

[0314] (29-33αA3-c) a protein comprising an amino acid sequence encoded by a nucleotide sequence with deletion, substitution, insertion or addition of one or several nucleotides in SEQ ID NO: 446;

[0315] (29-33αA3-d) a protein comprising an amino acid sequence encoded by a nucleotide sequence having at least 70% identity to the nucleotide sequence of SEQ ID NO: 446; or

[0316] (29-33αA3-e) a protein comprising an amino acid sequence encoded by a nucleic acid that hybridizes under stringent conditions with a nucleic acid having a nucleotide sequence complementary to the nucleotide sequence of SEQ ID NO: 446; or

[0317] (29-33αB3) a protein comprising at least one amino acid sequence selected from the group consisting of SEQ ID NOs: 448-451,

(34α) (34αA1) bifunctional UDP-glucose 4-epimerase and UDP-xylose 4-epimerase 1-like or a variant thereof, which is defined below in any of (34αA1-a) to (34αA1-e):

[0318] (34αA1-a) a protein comprising an amino acid sequence with deletion, substitution, insertion or addition of one or several amino acids in SEQ ID NO: 453;

[0319] (34αA11-b) a protein comprising an amino acid sequence having at least 70% identity to the amino acid sequence of SEQ ID NO: 453;

[0320] (34αA1-c) a protein comprising an amino acid sequence encoded by a nucleotide sequence with deletion, substitution, insertion or addition of one or several nucleotides in SEQ ID NO: 452;

[0321] (34αA1-d) a protein comprising an amino acid sequence encoded by a nucleotide sequence having at least 70% identity to the nucleotide sequence of SEQ ID NO: 452; or

[0322] (34αA1-e) a protein comprising an amino acid sequence encoded by a nucleic acid that hybridizes under stringent conditions with a nucleic acid having a nucleotide sequence complementary to the nucleotide sequence of SEQ ID NO: 452;

[0323] (34αB1) a protein comprising an amino acid sequence of SEQ ID NO: 454;

[0324] (34αA2) uncharacterized protein LOC100803483 or a variant thereof, which is defined below in any of (34αA2-a) to (34αA2-e):

[0325] (34αA2-a) a protein comprising an amino acid sequence with deletion, substitution, insertion or addition of one or several amino acids in SEQ ID NO: 456;

[0326] (34αA2-b) a protein comprising an amino acid sequence having at least 70% identity to the amino acid sequence of SEQ ID NO: 456;

[0327] (34αA2-c) a protein comprising an amino acid sequence encoded by a nucleotide sequence with deletion, substitution, insertion or addition of one or several nucleotides in SEQ ID NO: 455;

[0328] (34αA2-d) a protein comprising an amino acid sequence encoded by a nucleotide sequence having at least 70% identity to the nucleotide sequence of SEQ ID NO: 455; or

[0329] (34αA2-e) a protein comprising an amino acid sequence encoded by a nucleic acid that hybridizes under stringent conditions with a nucleic acid having a nucleotide sequence complementary to the nucleotide sequence of SEQ ID NO: 455; or

[0330] (34αB2) a protein comprising at least one amino acid sequence selected from the group consisting of SEQ ID NOs: 457 and 458;

(35α) (35αA1) elongation factor 1-alpha or a variant thereof, which is defined below in any of (35αA1-a) to (35αA1-e):

[0331] (35αA1-a) a protein comprising an amino acid sequence with deletion, substitution, insertion or addition of one or several amino acids in SEQ ID NO: 460;

[0332] (35αA1-b) a protein comprising an amino acid sequence having at least 70% identity to the amino acid sequence of SEQ ID NO: 460;

[0333] (35αA1-c) a protein comprising an amino acid sequence encoded by a nucleotide sequence with deletion, substitution, insertion or addition of one or several nucleotides in SEQ ID NO: 459;

[0334] (35αA1-d) a protein comprising an amino acid sequence encoded by a nucleotide sequence having at least 70% identity to the nucleotide sequence of SEQ ID NO: 459; or

[0335] (35αA1-e) a protein comprising an amino acid sequence encoded by a nucleic acid that hybridizes under stringent conditions with a nucleic acid having a nucleotide sequence complementary to the nucleotide sequence of SEQ ID NO: 459;

[0336] (35αB1) a protein comprising at least one amino acid sequence selected from the group consisting of SEQ ID NOs: 461-466;

[0337] (35αA2) elongation factor 1-alpha or a variant thereof, which is defined below in any of (35αA2-a) to (35αA2-e):

[0338] (35αA2-a) a protein comprising an amino acid sequence with deletion, substitution, insertion or addition of one or several amino acids in SEQ ID NO: 468;

[0339] (35αA2-b) a protein comprising an amino acid sequence having at least 70% identity to the amino acid sequence of SEQ ID NO: 468;

[0340] (35αA2-c) a protein comprising an amino acid sequence encoded by a nucleotide sequence with deletion, substitution, insertion or addition of one or several nucleotides in SEQ ID NO: 467;

[0341] (35αA2-d) a protein comprising an amino acid sequence encoded by a nucleotide sequence having at least 70% identity to the nucleotide sequence of SEQ ID NO: 467; or

[0342] (35αA2-e) a protein comprising an amino acid sequence encoded by a nucleic acid that hybridizes under stringent conditions with a nucleic acid having a nucleotide sequence complementary to the nucleotide sequence of SEQ ID NO: 467;

[0343] (35αB2) a protein comprising at least one amino acid sequence selected from the group consisting of SEQ ID NOs: 469-471;

[0344] (35αA3) elongation factor-1A isoform X1 or a variant thereof, which is defined below in any of (35αA3-a) to (35αA3-e):

[0345] (35αA3-a) a protein comprising an amino acid sequence with deletion, substitution, insertion or addition of one or several amino acids in SEQ ID NO: 473;

[0346] (35αA3-b) a protein comprising an amino acid sequence having at least 70% identity to the amino acid sequence of SEQ ID NO: 473;

[0347] (35αA3-c) a protein comprising an amino acid sequence encoded by a nucleotide sequence with deletion, substitution, insertion or addition of one or several nucleotides in SEQ ID NO: 472;

[0348] (35αA3-d) a protein comprising an amino acid sequence encoded by a nucleotide sequence having at least 70% identity to the nucleotide sequence of SEQ ID NO: 472; or

[0349] (35αA3-e) a protein comprising an amino acid sequence encoded by a nucleic acid that hybridizes under stringent conditions with a nucleic acid having a nucleotide sequence complementary to the nucleotide sequence of SEQ ID NO: 472; or

[0350] (35αB3) a protein comprising at least one amino acid sequence selected from the group consisting of SEQ ID NOs: 474-477;

(36, 37α) (36, 37αA1) seed maturation protein PM34 or a variant thereof, which is defined below in any of (36, 37αA1-a) to (36, 37αA1-e):

[0351] (36, 37αA1-a) a protein comprising an amino acid sequence with deletion, substitution, insertion or addition of one or several amino acids in SEQ ID NO: 479;

[0352] (36, 37αA1-b) a protein comprising an amino acid sequence having at least 70% identity to the amino acid sequence of SEQ ID NO: 479;

[0353] (36, 37αA1-c) a protein comprising an amino acid sequence encoded by a nucleotide sequence with deletion, substitution, insertion or addition of one or several nucleotides in SEQ ID NO: 478;

[0354] (36, 37αA1-d) a protein comprising an amino acid sequence encoded by a nucleotide sequence having at least 70% identity to the nucleotide sequence of SEQ ID NO: 478; or

[0355] (36, 37αA1-e) a protein comprising an amino acid sequence encoded by a nucleic acid that hybridizes under stringent conditions with a nucleic acid having a nucleotide sequence complementary to the nucleotide sequence of SEQ ID NO: 478;

[0356] (36, 37αB1) a protein comprising at least one amino acid sequence selected from the group consisting of SEQ ID NOs: 480-483;

[0357] (36, 37αA2) uncharacterized protein LOC100809384 or a variant thereof, which is defined below in any of (36, 37αA2-a) to (36, 37αA2-e):

[0358] (36, 37αA2-a) a protein comprising an amino acid sequence with deletion, substitution, insertion or addition of one or several amino acids in SEQ ID NO: 485;

[0359] (36, 37αA2-b) a protein comprising an amino acid sequence having at least 70% identity to the amino acid sequence of SEQ ID NO: 485;

[0360] (36, 37αA2-c) a protein comprising an amino acid sequence encoded by a nucleotide sequence with deletion, substitution, insertion or addition of one or several nucleotides in SEQ ID NO: 484;

[0361] (36, 37αA2-d) a protein comprising an amino acid sequence encoded by a nucleotide sequence having at least 70% identity to the nucleotide sequence of SEQ ID NO: 484; or

[0362] (36, 37αA2-e) a protein comprising an amino acid sequence encoded by a nucleic acid that hybridizes under stringent conditions with a nucleic acid having a nucleotide sequence complementary to the nucleotide sequence of SEQ ID NO: 484;

[0363] (36, 37αB2) a protein comprising at least one amino acid sequence selected from the group consisting of SEQ ID NOs: 486 and 487;

[0364] (36, 37αA3) hypothetical protein GLYMA_10G155300 or a variant thereof, which is defined below in any of (36, 37αA3-a) to (36, 37αA3-e):

[0365] (36, 37αA3-a) a protein comprising an amino acid sequence with deletion, substitution, insertion or addition of one or several amino acids in SEQ ID NO: 489;

[0366] (36, 37αA3-b) a protein comprising an amino acid sequence having at least 70% identity to the amino acid sequence of SEQ ID NO: 489;

[0367] (36, 37αA3-c) a protein comprising an amino acid sequence encoded by a nucleotide sequence with deletion, substitution, insertion or addition of one or several nucleotides in SEQ ID NO: 488;

[0368] (36, 37αA3-d) a protein comprising an amino acid sequence encoded by a nucleotide sequence having at least 70% identity to the nucleotide sequence of SEQ ID NO: 488; or

[0369] (36, 37αA3-e) a protein comprising an amino acid sequence encoded by a nucleic acid that hybridizes under stringent conditions with a nucleic acid having a nucleotide sequence complementary to the nucleotide sequence of SEQ ID NO: 488; or

[0370] (36, 37αB3) a protein comprising at least one amino acid sequence selected from the group consisting of SEQ ID NOs: 490-493;

(38α) (38αA) seed biotin-containing protein SBP65-like isoform X1 or a variant thereof, which is defined below in any of (38αA-a) to (380αA-e):

[0371] (38αA-a) a protein comprising an amino acid sequence with deletion, substitution, insertion or addition of one or several amino acids in SEQ ID NO: 495;

[0372] (38αA-b) a protein comprising an amino acid sequence having at least 70% identity to the amino acid sequence of SEQ ID NO: 495;

[0373] (38αA-c) a protein comprising an amino acid sequence encoded by a nucleotide sequence with deletion, substitution, insertion or addition of one or several nucleotides in SEQ ID NO: 494;

[0374] (38αA-d) a protein comprising an amino acid sequence encoded by a nucleotide sequence having at least 70% identity to the nucleotide sequence of SEQ ID NO: 494; or

[0375] (38αA-e) a protein comprising an amino acid sequence encoded by a nucleic acid that hybridizes under stringent conditions with a nucleic acid having a nucleotide sequence complementary to the nucleotide sequence of SEQ ID NO: 494; or

[0376] (38αB) a protein comprising at least one amino acid sequence selected from the group consisting of SEQ ID NOs: 496-513;

(39α) (39αA) ATP synthase subunit O, mitochondrial-like or a variant thereof, which is defined below in any of (39αA-a) to (39αA-e):

[0377] (39αA-a) a protein comprising an amino acid sequence with deletion, substitution, insertion or addition of one or several amino acids in SEQ ID NO: 515;

[0378] (39αA-b) a protein comprising an amino acid sequence having at least 70% identity to the amino acid sequence of SEQ ID NO: 515;

[0379] (39αA-c) a protein comprising an amino acid sequence encoded by a nucleotide sequence with deletion, substitution, insertion or addition of one or several nucleotides in SEQ ID NO: 514;

[0380] (39αA-d) a protein comprising an amino acid sequence encoded by a nucleotide sequence having at least 70% identity to the nucleotide sequence of SEQ ID NO: 514; or

[0381] (39αA-e) a protein comprising an amino acid sequence encoded by a nucleic acid that hybridizes under stringent conditions with a nucleic acid having a nucleotide sequence complementary to the nucleotide sequence of SEQ ID NO: 514; or

[0382] (39αB) a protein comprising an amino acid sequence of SEQ ID NO: 516;

(40, 56α) (40, 56αA) P24 oleosin isoform A or a variant thereof, which is defined below in any of (40, 56αA-a) to (40, 56αA-e):

[0383] (40, 56αA-a) a protein comprising an amino acid sequence with deletion, substitution, insertion or addition of one or several amino acids in SEQ ID NO: 518;

[0384] (40, 56αA-b) a protein comprising an amino acid sequence having at least 70% identity to the amino acid sequence of SEQ ID NO: 518;

[0385] (40, 56αA-c) a protein comprising an amino acid sequence encoded by a nucleotide sequence with deletion, substitution, insertion or addition of one or several nucleotides in SEQ ID NO: 517;

[0386] (40, 56αA-d) a protein comprising an amino acid sequence encoded by a nucleotide sequence having at least 70% identity to the nucleotide sequence of SEQ ID NO: 517; or

[0387] (40, 56αA-e) a protein comprising an amino acid sequence encoded by a nucleic acid that hybridizes under stringent conditions with a nucleic acid having a nucleotide sequence complementary to the nucleotide sequence of SEQ ID NO: 517; or

[0388] (40, 56αB) a protein comprising at least one amino acid sequence selected from the group consisting of SEQ ID NOs: 519 and 520;

(41α) (41αA) uncharacterized protein At3g49720-like isoform X2 or a variant thereof, which is defined below in any of (41αA-a) to (41αA-e):

[0389] (41αA-a) a protein comprising an amino acid sequence with deletion, substitution, insertion or addition of one or several amino acids in SEQ ID NO: 522;

[0390] (41αA-b) a protein comprising an amino acid sequence having at least 70% identity to the amino acid sequence of SEQ ID NO: 522;

[0391] (41αA-c) a protein comprising an amino acid sequence encoded by a nucleotide sequence with deletion, substitution, insertion or addition of one or several nucleotides in SEQ ID NO: 521;

[0392] (41αA-d) a protein comprising an amino acid sequence encoded by a nucleotide sequence having at least 70% identity to the nucleotide sequence of SEQ ID NO: 521; or

[0393] (41αA-e) a protein comprising an amino acid sequence encoded by a nucleic acid that hybridizes under stringent conditions with a nucleic acid having a nucleotide sequence complementary to the nucleotide sequence of SEQ ID NO: 521; or

[0394] (41αB) a protein comprising an amino acid sequence of SEQ ID NO: 523;

(42, 43α) (42, 43αA1) superoxide dismutase [Mn], mitochondrial or a variant thereof, which is defined below in any of (42, 43αA1-a) to (42, 43αA1-e):

[0395] (42, 43αA11-a) a protein comprising an amino acid sequence with deletion, substitution, insertion or addition of one or several amino acids in SEQ ID NO: 525;

[0396] (42, 43αA1-b) a protein comprising an amino acid sequence having at least 70% identity to the amino acid sequence of SEQ ID NO: 525;

[0397] (42, 43αA1-c) a protein comprising an amino acid sequence encoded by a nucleotide sequence with deletion, substitution, insertion or addition of one or several nucleotides in SEQ ID NO: 524;

[0398] (42, 43αA1-d) a protein comprising an amino acid sequence encoded by a nucleotide sequence having at least 70% identity to the nucleotide sequence of SEQ ID NO: 524; or

[0399] (42, 43αA1-e) a protein comprising an amino acid sequence encoded by a nucleic acid that hybridizes under stringent conditions with a nucleic acid having a nucleotide sequence complementary to the nucleotide sequence of SEQ ID NO: 524;

[0400] (42, 43αB1) a protein comprising at least one amino acid sequence selected from the group consisting of SEQ ID NOs: 526-531;

[0401] (42, 43αA2) hypothetical protein GLYMA_04G221300 or a variant thereof, which is defined below in any of (42, 43αA2-a) to (42, 43αA2-e):

[0402] (42, 43αA2-a) a protein comprising an amino acid sequence with deletion, substitution, insertion or addition of one or several amino acids in SEQ ID NO: 533;

[0403] (42, 43αA2-b) a protein comprising an amino acid sequence having at least 70% identity to the amino acid sequence of SEQ ID NO: 533;

[0404] (42, 43αA2-c) a protein comprising an amino acid sequence encoded by a nucleotide sequence with deletion, substitution, insertion or addition of one or several nucleotides in SEQ ID NO: 532;

[0405] (42, 43αA2-d) a protein comprising an amino acid sequence encoded by a nucleotide sequence having at least 70% identity to the nucleotide sequence of SEQ ID NO: 532; or

[0406] (42, 43αA2-e) a protein comprising an amino acid sequence encoded by a nucleic acid that hybridizes under stringent conditions with a nucleic acid having a nucleotide sequence complementary to the nucleotide sequence of SEQ ID NO: 532; or

[0407] (42, 43αB2) a protein comprising at least one amino acid sequence selected from the group consisting of SEQ ID NOs: 534-539;

(45α) (45αA1) uncharacterized protein LOC100499771 or a variant thereof, which is defined below in any of (45αA1-a) to (45αA1-e):

[0408] (45αA1-a) a protein comprising an amino acid sequence with deletion, substitution, insertion or addition of one or several amino acids in SEQ ID NO: 541;

[0409] (45αA1-b) a protein comprising an amino acid sequence having at least 70% identity to the amino acid sequence of SEQ ID NO: 541;

[0410] (45αA1-c) a protein comprising an amino acid sequence encoded by a nucleotide sequence with deletion, substitution, insertion or addition of one or several nucleotides in SEQ ID NO: 540;

[0411] (45αA1-d) a protein comprising an amino acid sequence encoded by a nucleotide sequence having at least 70% identity to the nucleotide sequence of SEQ ID NO: 540; or

[0412] (45αA1-e) a protein comprising an amino acid sequence encoded by a nucleic acid that hybridizes under stringent conditions with a nucleic acid having a nucleotide sequence complementary to the nucleotide sequence of SEQ 1D NO: 540;

[0413] (45αB1) a protein comprising at least one amino acid sequence selected from the group consisting of SEQ ID NOs: 542-545;

[0414] (45αA2) hypothetical protein GLYMA_09G192800 or a variant thereof, which is defined below in any of (45αA2-a) to (45αA2-e):

[0415] (45αA2-a) a protein comprising an amino acid sequence with deletion, substitution, insertion or addition of one or several amino acids in SEQ ID NO: 547;

[0416] (45αA2-b) a protein comprising an amino acid sequence having at least 70% identity to the amino acid sequence of SEQ ID NO: 547;

[0417] (45αA2-c) a protein comprising an amino acid sequence encoded by a nucleotide sequence with deletion, substitution, insertion or addition of one or several nucleotides in SEQ ID NO: 546;

[0418] (45αA2-d) a protein comprising an amino acid sequence encoded by a nucleotide sequence having at least 70% identity to the nucleotide sequence of SEQ ID NO: 546; or

[0419] (45αA2-e) a protein comprising an amino acid sequence encoded by a nucleic acid that hybridizes under stringent conditions with a nucleic acid having a nucleotide sequence complementary to the nucleotide sequence of SEQ ID NO: 546; or

[0420] (45αB2) a protein comprising at least one amino acid sequence selected from the group consisting of SEQ ID NOs: 548-551;

(46α) (46αA) seed maturation protein PM22 or a variant thereof, which is defined below in any of (46αA-a) to (46αA-e):

[0421] (46αA-a) a protein comprising an amino acid sequence with deletion, substitution, insertion or addition of one or several amino acids in SEQ ID NO: 553;

[0422] (46αA-b) a protein comprising an amino acid sequence having at least 70% identity to the amino acid sequence of SEQ ID NO: 553;

[0423] (46αA-c) a protein comprising an amino acid sequence encoded by a nucleotide sequence with deletion, substitution, insertion or addition of one or several nucleotides in SEQ ID NO: 552;

[0424] (46αA-d) a protein comprising an amino acid sequence encoded by a nucleotide sequence having at least 70% identity to the nucleotide sequence of SEQ ID NO: 552; or

[0425] (46αA-e) a protein comprising an amino acid sequence encoded by a nucleic acid that hybridizes under stringent conditions with a nucleic acid having a nucleotide sequence complementary to the nucleotide sequence of SEQ ID NO: 552; or

[0426] (46αB) a protein comprising an amino acid sequence of SEQ ID NO: 554;

(47α) (47αA1) eukaryotic translation initiation factor 5A-2 or a variant thereof, which is defined below in any of (47αA1-a) to (47αA1-e):

[0427] (47αA1-a) a protein comprising an amino acid sequence with deletion, substitution, insertion or addition of one or several amino acids in SEQ ID NO: 556;

[0428] (47αA1-b) a protein comprising an amino acid sequence having at least 70% identity to the amino acid sequence of SEQ ID NO: 556;

[0429] (47αA1-c) a protein comprising an amino acid sequence encoded by a nucleotide sequence with deletion, substitution, insertion or addition of one or several nucleotides in SEQ ID NO: 555;

[0430] (47αA1-d) a protein comprising an amino acid sequence encoded by a nucleotide sequence having at least 70% identity to the nucleotide sequence of SEQ ID NO: 555; or

[0431] (47αA1-e) a protein comprising an amino acid sequence encoded by a nucleic acid that hybridizes under stringent conditions with a nucleic acid having a nucleotide sequence complementary to the nucleotide sequence of SEQ ID NO: 555;

[0432] (47αB1) a protein comprising at least one amino acid sequence selected from the group consisting of SEQ ID NOs: 557 and 558;

[0433] (47αA2) uncharacterized protein LOC100305510 or a variant thereof, which is defined below in any of (47αA2-a) to (47αA2-e):

[0434] (47αA2-a) a protein comprising an amino acid sequence with deletion, substitution, insertion or addition of one or several amino acids in SEQ ID NO: 560;

[0435] (47αA2-b) a protein comprising an amino acid sequence having at least 70% identity to the amino acid sequence of SEQ ID NO: 560;

[0436] (47αA2-c) a protein comprising an amino acid sequence encoded by a nucleotide sequence with deletion, substitution, insertion or addition of one or several nucleotides in SEQ ID NO: 559;

[0437] (47αA2-d) a protein comprising an amino acid sequence encoded by a nucleotide sequence having at least 70% identity to the nucleotide sequence of SEQ ID NO: 559; or

[0438] (47αA2-e) a protein comprising an amino acid sequence encoded by a nucleic acid that hybridizes under stringent conditions with a nucleic acid having a nucleotide sequence complementary to the nucleotide sequence of SEQ ID NO: 559; or

[0439] (47αB2) a protein comprising at least one amino acid sequence selected from the group consisting of SEQ ID NOs: 561-563;

[0440] (48α) (48αA) uncharacterized protein LOC100306570 or a variant thereof, which is defined below in any of (48αA-a) to (48αA-e):

[0441] (48αA-a) a protein comprising an amino acid sequence with deletion, substitution, insertion or addition of one or several amino acids in SEQ ID NO: 565;

[0442] (48αA-b) a protein comprising an amino acid sequence having at least 70% identity to the amino acid sequence of SEQ ID NO: 565;

[0443] (48αA-c) a protein comprising an amino acid sequence encoded by a nucleotide sequence with deletion, substitution, insertion or addition of one or several nucleotides in SEQ ID NO: 564;

[0444] (48αA-d) a protein comprising an amino acid sequence encoded by a nucleotide sequence having at least 70% identity to the nucleotide sequence of SEQ ID NO: 564; or

[0445] (48αA-e) a protein comprising an amino acid sequence encoded by a nucleic acid that hybridizes under stringent conditions with a nucleic acid having a nucleotide sequence complementary to the nucleotide sequence of SEQ ID NO: 564; or

[0446] (48αB) a protein comprising at least one amino acid sequence selected from the group consisting of SEQ ID NOs: 566-570;

(50α) (50αA) uncharacterized protein LOC100813859 or a variant thereof, which is defined below in any of (50αA-a) to (50αA-e):

[0447] (50αA-a) a protein comprising an amino acid sequence with deletion, substitution, insertion or addition of one or several amino acids in SEQ ID NO: 572;

[0448] (50αA-b) a protein comprising an amino acid sequence having at least 70% identity to the amino acid sequence of SEQ ID NO: 572;

[0449] (50αA-c) a protein comprising an amino acid sequence encoded by a nucleotide sequence with deletion, substitution, insertion or addition of one or several nucleotides in SEQ ID NO: 571;

[0450] (50αA-d) a protein comprising an amino acid sequence encoded by a nucleotide sequence having at least 70% identity to the nucleotide sequence of SEQ ID NO: 571; or

[0451] (50αA-e) a protein comprising an amino acid sequence encoded by a nucleic acid that hybridizes under stringent conditions with a nucleic acid having a nucleotide sequence complementary to the nucleotide sequence of SEQ ID NO: 571; or

[0452] (50αB) a protein comprising at least one amino acid sequence selected from the group consisting of SEQ ID NOs: 573-576;

(51α) (51αA) 14-3-3-like protein or a variant thereof, which is defined below in any of (51αA-a) to (51αA-e):

[0453] (51αA-a) a protein comprising an amino acid sequence with deletion, substitution, insertion or addition of one or several amino acids in SEQ ID NO: 578;

[0454] (51αA-b) a protein comprising an amino acid sequence having at least 70% identity to the amino acid sequence of SEQ ID NO: 578;

[0455] (51αA-c) a protein comprising an amino acid sequence encoded by a nucleotide sequence with deletion, substitution, insertion or addition of one or several nucleotides in SEQ ID NO: 577; (51αA-d) a protein comprising an amino acid sequence encoded by a nucleotide sequence having at least 70% identity to the nucleotide sequence of SEQ ID NO: 577; or

[0456] (51αA-e) a protein comprising an amino acid sequence encoded by a nucleic acid that hybridizes under stringent conditions with a nucleic acid having a nucleotide sequence complementary to the nucleotide sequence of SEQ ID NO: 577; or (51αB) a protein comprising at least one amino acid sequence selected from the group consisting of SEQ ID NOs: 579-582;

(52α) (52αA) probable fructokinase-4 or a variant thereof, which is defined below in any of (52αA-a) to (52αA-e):

[0457] (52αA-a) a protein comprising an amino acid sequence with deletion, substitution, insertion or addition of one or several amino acids in SEQ ID NO: 584;

[0458] (52αA-b) a protein comprising an amino acid sequence having at least 70% identity to the amino acid sequence of SEQ ID NO: 584;

[0459] (52αA-c) a protein comprising an amino acid sequence encoded by a nucleotide sequence with deletion, substitution, insertion or addition of one or several nucleotides in SEQ ID NO: 583;

[0460] (52αA-d) a protein comprising an amino acid sequence encoded by a nucleotide sequence having at least 70% identity to the nucleotide sequence of SEQ ID NO: 583; or

[0461] (52αA-e) a protein comprising an amino acid sequence encoded by a nucleic acid that hybridizes under stringent conditions with a nucleic acid having a nucleotide sequence complementary to the nucleotide sequence of SEQ ID NO: 583; or

[0462] (52αB) a protein comprising at least one amino acid sequence selected from the group consisting of SEQ ID NOs: 585-588;

(53α) (53αA1) triosephosphate isomerase isoform X1 or a variant thereof, which is defined below in any of (53αA1-a) to (53αA1-e):

[0463] (53αA1-a) a protein comprising an amino acid sequence with deletion, substitution, insertion or addition of one or several amino acids in SEQ ID NO: 590;

[0464] (53αA1-b) a protein comprising an amino acid sequence having at least 70% identity to the amino acid sequence of SEQ ID NO: 590;

[0465] (53αA1-c) a protein comprising an amino acid sequence encoded by a nucleotide sequence with deletion, substitution, insertion or addition of one or several nucleotides in SEQ ID NO: 589;

[0466] (53αA1-d) a protein comprising an amino acid sequence encoded by a nucleotide sequence having at least 70% identity to the nucleotide sequence of SEQ ID NO: 589; or

[0467] (53αA1-e) a protein comprising an amino acid sequence encoded by a nucleic acid that hybridizes under stringent conditions with a nucleic acid having a nucleotide sequence complementary to the nucleotide sequence of SEQ ID NO: 589;

[0468] (53αB1) a protein comprising at least one amino acid sequence selected from the group consisting of SEQ ID NOs: 591-597;

[0469] (53αA2) triosephosphate isomerase, cytosolic or a variant thereof, which is defined below in any of (53αA2-a) to (53αA2-e):

[0470] (53αA2-a) a protein comprising an amino acid sequence with deletion, substitution, insertion or addition of one or several amino acids in SEQ ID NO: 599;

[0471] (53αA2-b) a protein comprising an amino acid sequence having at least 70% identity to the amino acid sequence of SEQ ID NO: 599;

[0472] (53αA2-c) a protein comprising an amino acid sequence encoded by a nucleotide sequence with deletion, substitution, insertion or addition of one or several nucleotides in SEQ ID NO: 598;

[0473] (53αA2-d) a protein comprising an amino acid sequence encoded by a nucleotide sequence having at least 70% identity to the nucleotide sequence of SEQ ID NO: 598; or

[0474] (53αA2-e) a protein comprising an amino acid sequence encoded by a nucleic acid that hybridizes under stringent conditions with a nucleic acid having a nucleotide sequence complementary to the nucleotide sequence of SEQ ID NO: 598; or

[0475] (53αB2) a protein comprising at least one amino acid sequence selected from the group consisting of SEQ ID NOs: 600-604;

(54α) (54αA1) superoxide dismutase [Fe], chloroplastic isoform X1 or a variant thereof, which is defined below in any of (54αA1-a) to (54αA1-e):

[0476] (54αA1-a) a protein comprising an amino acid sequence with deletion, substitution, insertion or addition of one or several amino acids in SEQ ID NO: 606;

[0477] (54αA1-b) a protein comprising an amino acid sequence having at least 70% identity to the amino acid sequence of SEQ ID NO: 606;

[0478] (53αA1-c) a protein comprising an amino acid sequence encoded by a nucleotide sequence with deletion, substitution, insertion or addition of one or several nucleotides in SEQ ID NO: 605;

[0479] (54αA1-d) a protein comprising an amino acid sequence encoded by a nucleotide sequence having at least 70% identity to the nucleotide sequence of SEQ ID NO: 605; or

[0480] (54αA1-e) a protein comprising an amino acid sequence encoded by a nucleic acid that hybridizes under stringent conditions with a nucleic acid having a nucleotide sequence complementary to the nucleotide sequence of SEQ ID NO: 605;

[0481] (54αB1) a protein comprising at least one amino acid sequence selected from the group consisting of SEQ ID NOs: 607-611;

[0482] (54αA2) iron-superoxide dismutase or a variant thereof, which is defined below in any of (54αA2-a) to (54αA2-e):

[0483] (54αA2-a) a protein comprising an amino acid sequence with deletion, substitution, insertion or addition of one or several amino acids in SEQ ID NO: 613;

[0484] (54αA2-b) a protein comprising an amino acid sequence having at least 70% identity to the amino acid sequence of SEQ ID NO: 613;

[0485] (54αA2-c) a protein comprising an amino acid sequence encoded by a nucleotide sequence with deletion, substitution, insertion or addition of one or several nucleotides in SEQ ID NO: 612;

[0486] (54αA2-d) a protein comprising an amino acid sequence encoded by a nucleotide sequence having at least 70% identity to the nucleotide sequence of SEQ ID NO: 612; or

[0487] (54αA2-e) a protein comprising an amino acid sequence encoded by a nucleic acid that hybridizes under stringent conditions with a nucleic acid having a nucleotide sequence complementary to the nucleotide sequence of SEQ ID NO: 612; or

[0488] (54αB2) a protein comprising at least one amino acid sequence selected from the group consisting of SEQ ID NOs: 614-616; or

(55α) (55αA1) 51 kDa seed maturation protein precursor or a variant thereof, which is defined below in any of (55αA1-a) to (55αA1-e):

[0489] (55αA1-a) a protein comprising an amino acid sequence with deletion, substitution, insertion or addition of one or several amino acids in SEQ ID NO: 618;

[0490] (55αA1-b) a protein comprising an amino acid sequence having at least 70% identity to the amino acid sequence of SEQ ID NO: 618;

[0491] (55αA1-c) a protein comprising an amino acid sequence encoded by a nucleotide sequence with deletion, substitution, insertion or addition of one or several nucleotides in SEQ ID NO: 617;

[0492] (55αA1-d) a protein comprising an amino acid sequence encoded by a nucleotide sequence having at least 70% identity to the nucleotide sequence of SEQ ID NO: 617; or

[0493] (55αA1-e) a protein comprising an amino acid sequence encoded by a nucleic acid that hybridizes under stringent conditions with a nucleic acid having a nucleotide sequence complementary to the nucleotide sequence of SEQ ID NO: 617;

[0494] (55αB1) a protein comprising at least one amino acid sequence selected from the group consisting of SEQ ID NOs: 619-635;

[0495] (55αA2) Lea protein precursor or a variant thereof, which is defined below in any of (55αA2-a) to (55αA2-e):

[0496] (55αA2-a) a protein comprising an amino acid sequence with deletion, substitution, insertion or addition of one or several amino acids in SEQ ID NO: 637;

[0497] (55αA2-b) a protein comprising an amino acid sequence having at least 70% identity to the amino acid sequence of SEQ ID NO: 637;

[0498] (55αA2-c) a protein comprising an amino acid sequence encoded by a nucleotide sequence with deletion, substitution, insertion or addition of one or several nucleotides in SEQ ID NO: 636;

[0499] (55αA2-d) a protein comprising an amino acid sequence encoded by a nucleotide sequence having at least 70% identity to the nucleotide sequence of SEQ ID NO: 636; or

[0500] (55αA2-e) a protein comprising an amino acid sequence encoded by a nucleic acid that hybridizes under stringent conditions with a nucleic acid having a nucleotide sequence complementary to the nucleotide sequence of SEQ ID NO: 636; or

[0501] (55αB2) a protein comprising at least one amino acid sequence selected from the group consisting of SEQ ID NOs: 638-649.

[0502] [10] A composition for diagnosing an allergy to a soybean, comprising, as an antigen, at least one of proteins as defined above in any of (1α) to (55α) of [9].

[0503] [11] A method for providing an indicator for diagnosing an allergy to a soybean in a subject, the method comprising the steps of:

(i) contacting a sample obtained from the subject with an antigen, wherein the sample is a solution comprising an Ig antibody;
(ii) detecting binding between the IgE antibody present in the sample from the subject and the antigen; and
(iii) when the binding between the IgE antibody in the subject and the antigen is detected, an indicator of the fact that the subject is allergic to a soybean is provided;
wherein the antigen is at least one of proteins as defined above in any of (1α) to (55α) of [9].

[0504] [12] A pharmaceutical composition comprising at least one of proteins as defined above in any of (1α) to (55α) of [9].

[0505] [13] The pharmaceutical composition as set forth in [12], wherein the pharmaceutical composition is intended for the treatment of an allergy to a soybean.

[0506] [14] A soybean or processed products of soybean in which an antigen is eliminated or reduced, wherein the antigen is at least one of proteins as defined above in any of (lca) to (55α) of [9].

[0507] [15] A tester for determining the presence or absence of a soybean antigen in an object of interest, comprising an antibody that binds to at least one of proteins as defined above in any of (1α) to (55α) of [9].

[0508] [16] A soybean-derived antigen which is at least one of proteins as defined above in any of (1α) to (55α) of [9] and is causative of an allergy to soybean.

### Advantageous Effects of Invention

[0509] The present invention can provide novel antigens of an allergy to soybean. Since the novel antigens (allergen components) that trigger a soybean allergy were identified according to this invention, this invention can provide highly sensitive methods and kits for diagnosing an allergy to soybean, pharmaceutical compositions comprising such an antigen, soybean or processed products of soybean in which such an antigen is eliminated or reduced.

### BRIEF DESCRIPTION OF DRAWINGS

[0510] FIG. 1 is a photograph of a gel showing a protein electrophoretic pattern in two-dimensional electrophoresis of proteins contained in soybean. The bands at the left of the photograph are bands of molecular weight markers.

[0511] FIG. 2 is a photograph of an immunoblot of a two-dimensional electrophoretic pattern of proteins contained in soybean stained with serum of a healthy subject.

[0512] FIG. 3A is a photograph of an immunoblot of a two-dimensional electrophoretic pattern of proteins contained in soybean stained with serum of Soybean-allergic patient 1. The arrows indicate spots where the serum of the soybean-allergic patient specifically reacted.

[0513] FIG. 3B is a photograph of an immunoblot of a two-dimensional electrophoretic pattern of proteins contained in soybean stained with serum of Soybean-allergic patient 2. The arrows indicate spots where the serum of the soybean-allergic patient specifically reacted.

[0514] FIG. 3C is a photograph of an immunoblot of a two-dimensional electrophoretic pattern of proteins contained in soybean stained with serum of Soybean-allergic patient 3. The arrows indicate spots where the serum of the soybean-allergic patient specifically reacted.

[0515] FIG. 3D is a photograph of an immunoblot of a two-dimensional electrophoretic pattern of proteins contained in soybean stained with serum of Soybean-allergic patient 4. The arrows indicate spots where the serum of the soybean-allergic patient specifically reacted.

[0516] FIG. 4 is a photograph of an immunoblot of a two-dimensional electrophoretic pattern of proteins contained in soybean stained with serum of a healthy subject.

[0517] FIG. 5A is a photograph of an immunoblot of a two-dimensional electrophoretic pattern of proteins contained in soybean stained with serum of Soybean-allergic patient 1α. The spots indicated with a white line or enclosed in a square are spot where the serum of the soybean-allergic patient specifically reacted. The numbers (n) indicated are the numbers of the spots and correspond to the spots indicated with “nα” herein.

[0518] FIG. 5B is a photograph of an immunoblot of a two-dimensional electrophoretic pattern of proteins contained in soybean stained with serum of Soybean-allergic patient 2α. The spots indicated with a white line or enclosed in a square are spot where the serum of the soybean-allergic patient specifically reacted. The numbers (n) indicated are the numbers of the spots and correspond to the spots indicated with “nα” herein.

[0519] FIG. 5C is a photograph of an immunoblot of a two-dimensional electrophoretic pattern of proteins contained in soybean stained with serum of Soybean-allergic patient 3α. The spots indicated with a white line or enclosed in a square are spot where the serum of the soybean-allergic patient specifically reacted. The numbers (n) indicated are the numbers of the spots and correspond to the spots indicated with “nα” herein.

[0520] FIG. 5D is a photograph of an immunoblot of a two-dimensional electrophoretic pattern of proteins contained in soybean stained with serum of Soybean-allergic patient 4α. The spots indicated with a while line are spots where the serum of the soybean-allergic patient specifically reacted. The numbers (n) indicated are the numbers of the spots and correspond to the spots indicated with “nα” herein.

[0521] FIG. 5E is a photograph of an immunoblot of a two-dimensional electrophoretic pattern of proteins contained in soybean stained with serum of Soybean-allergic patient 5α. The spots indicated with a while line are spots where the serum of the soybean-allergic patient specifically reacted. The numbers (n) indicated are the numbers of the spots and correspond to the spots indicated with “nα” herein.

[0522] FIG. 5F is a photograph of an immunoblot of a two-dimensional electrophoretic pattern of proteins contained in soybean stained with serum of Soybean-allergic patient 6α. The spots indicated with a white line or enclosed in a square are spot where the serum of the soybean-allergic patient specifically reacted. The numbers (n) indicated are the numbers of the spots and correspond to the spots indicated with “nα” herein.

[0523] FIG. 5G is a photograph of an immunoblot of a two-dimensional electrophoretic pattern of proteins contained in soybean stained with serum of Soybean-allergic patient 7α. The spots enclosed in a square are spots where the serum of the soybean-allergic patient specifically reacted. The numbers (n) indicated are the numbers of the spots and correspond to the spots indicated with “nα” herein.

[0524] FIG. 5H is a photograph of an immunoblot of a two-dimensional electrophoretic pattern of proteins contained in soybean stained with serum of Soybean-allergic patient 8α. The spots indicated with a white line or enclosed in a square are spot where the serum of the soybean-allergic patient specifically reacted. The numbers (n) indicated are the numbers of the spots and correspond to the spots indicated with “nα” herein.

[0525] FIG. 5I is a photograph of an immunoblot of a two-dimensional electrophoretic pattern of proteins contained in soybean stained with serum of Soybean-allergic patient 9α. The spots indicated with a white line or enclosed in a square are spot where the serum of the soybean-allergic patient specifically reacted. The numbers (n) indicated are the numbers of the spots and correspond to the spots indicated with “nα” herein.

### DESCRIPTION OF EMBODIMENTS

[0526] The present invention will be described in detail below, but the present invention is not limited to them.

[0527] Unless otherwise defined herein, all scientific and technical terms used in relation to the present invention shall have meanings commonly understood by those skilled in the art.

[0528] Amino acid sequences herein are represented by one-letter amino acid symbols well known to those skilled in the art and the left end corresponds to the amino terminal and the right end corresponds to the carboxy terminal.

[0529] As referred to herein, the “allergy” refers to the state in which, when a certain antigen enters the body of a living individual sensitized to said antigen, the living individual shows a hypersensitive reaction detrimental to him/her. In blood and tissues of individuals with many food-allergic diseases, IgE antibodies specific to antigens are produced. IgE antibodies bind to mast cells or basophils. When an antigen specific to such an IgE antibody enters again the body of a patient with an allergic disease, said antigen combines with the IgE antibody bound to mast cells or basophils, and the IgE antibody crosslinks said antigen on the cell surface, resulting in physiological effects of IgE antibody-antigen interaction. Examples of such physiological effects include release of histamine, serotonin, heparin, eosinophil chemotactic factors, leucotrienes, or the like. These released substances provoke an allergic reaction resulting from the combination of an IgE antibody with particular antigens. Such allergic reactions caused by particular antigens occur through the aforementioned pathway.

[0530] As referred to herein, the “allergy to soybean” refers to the state in which an individual has an allergic reaction caused by proteins, etc. present in soybean which act as an antigen. The allergy to soybean can produce an allergic reaction upon contact with, or consumption of, an antigen present in soybean. In general, allergic reactions caused by consumption of foods are particularly referred to as “food allergies”. The allergy to soybean may be a food allergy.

[0531] As referred to herein, the “antigen” refers to a substance that provokes an allergic reaction, and is also referred to as an “allergen component”. The antigen is preferably a protein.

[0532] As referred to herein, the “protein” refers to a molecule having a structure in which naturally occurring amino acids are joined together by peptide bond. The number of amino acids present in a protein is not particularly limited, but proteins having about 2 to 50 amino acids joined together by peptide bond are in some cases called “peptides”. In the case where amino acids can form different enantiomers, the amino acids are understood to form an L-enantiomer, unless otherwise indicated. The amino acid sequences of proteins or peptides as used herein are represented by one-letter symbols of amino acids in accordance with standard usage and the notational convention commonly used in the art. The leftward direction represents the amino-terminal direction, and the rightward direction represents the carboxy-terminal direction.

[0533] Identification of Antigens

[0534] Proteins contained in soybean were analyzed by the aforementioned technique to identify causative antigens of an allergy to soybean. To be specific, soybean proteins were subjected to two-dimensional electrophoresis under the conditions described below.

[0535] The electrophoresis in the first dimension was isoelectric focusing, which was performed using isoelectric focusing gels with a gel-strip length of 5 to 10 cm and a gel pH range of 3 to 10. The pH gradient of the gels in the direction of electrophoresis was as follows: with the total gel-strip length being taken as 1, the gel-strip length up to pH 5 was “a=0.15 to 0.3”, the gel-strip length from pH 5 to 7 was “b=0.4 to 0.7”, and the gel-strip length above pH 7 was “c=0.15 to 0.3”. More specifically, the isoelectric focusing was performed using the IPG gels, Immobiline Drystrip (pH3-10NL), produced by GE Healthcare Bio-Sciences Corporation (hereinafter abbreviated as “GE”). The electrophoresis system used was IPGphor produced by GE. The maximum current of the electrophoresis system was limited to 75 μA per gel strip. The voltage program adopted to perform the first-dimensional isoelectric focusing was as follows: (1) a constant voltage step was performed at a constant voltage of 300 V until the volt-hours reached 750 Vhr (the current variation width during electrophoresis for 30 minutes before the end of this step was 5 μA); (2) the voltage was increased gradually to 1000 V for 300 Vhr; (3) the voltage was further increased gradually to 5000 V for 4500 Vhr; and then (4) the voltage was held at a constant voltage of 5000 V until the total Vhr reached 12000.

[0536] The electrophoresis in the second dimension was SDS-PAGE, which was performed using polyacrylamide gels whose gel concentration at the distal end in the direction of electrophoresis was set to 3 to 6% and whose gel concentration at the proximal end was set to a higher value than that at the distal end. More specifically, the SDS-PAGE was performed using NuPAGE 4-12% Bris-Tris Gels (IPG well, Mini, 1 mm) produced by Life Technologies. The electrophoresis system used was XCell SureLock Mini-Cell produced by Life Technologies. The electrophoresis was run at a constant voltage of 200 V for about 45 minutes using an electrophoresis buffer composed of 50 mM MOPS, 50 mM Tris base, 0.1% (w/v) SDS and 1 mM EDTA.

[0537] As a result, the following spots in a two-dimensional electrophoresis gel run under the conditions described above for proteins in soybean have been revealed to exhibit specific binding to IgE antibodies from soybean-allergic patients.

Spot 1: Molecular weight 1 to 30 kDa, pI 3.0 to 7.0
Spot 2: Molecular weight 30 to 75 kDa, pI 4.0 to 8.5
Spot 3: Molecular weight 20 to 50 kDa, pI 7.0 to 12.0
Spot 4: Molecular weight 20 to 50 kDa, pI 6.0 to 10.0
Spot 5: Molecular weight 2 to 30 kDa, pI 4.0 to 9.0
Spot 6: Molecular weight 50 to 100 kDa, pI 5.0 to 10.0
Spot 7: Molecular weight 5 to 37 kDa, pI 3.0 to 7.0
Spot 8: Molecular weight 75 to 200 kDa, pI 4.0 to 6.0
Spot 1α: Molecular weight 70 to 120 kDa, pI 2.5 to 6.5
Spot 2α: Molecular weight 50 to 120 kDa, pI 2.5 to 6.5
Spot 4α: Molecular weight 70 to 120 kDa, pI 3.5 to 7.5
Spot 5α: Molecular weight 70 to 170 kDa, pI 3.5 to 7.5
Spot 6α: Molecular weight 70 to 120 kDa, pI 3.5 to 7.5
Spot 7α: Molecular weight 50 to 120 kDa, pI 3.5 to 7.5
Spot 8α: Molecular weight 50 to 120 kDa, pI 3.5 to 8.5
Spot 9α: Molecular weight 50 to 120 kDa, pI 3.5 to 8.5
Spot 10α: Molecular weight 30 to 90 kDa, pI 3.5 to 7.5
Spot 11α: Molecular weight 30 to 90 kDa, pI 3.5 to 8.5
Spot 12α: Molecular weight 30 to 90 kDa, pI 3.5 to 8.5
Spot 13α: Molecular weight 30 to 90 kDa, pI 3.5 to 7.5
Spot 14α: Molecular weight 30 to 90 kDa, pI 2.5 to 6.5
Spot 15α, 16α: Molecular weight 20 to 90 kDa, pI 3.5 to 7.5
Spot 17α: Molecular weight 20 to 90 kDa, pI 3.5 to 7.5
Spot 18α: Molecular weight 30 to 90 kDa, pI 3.5 to 8.5
Spot 19α: Molecular weight 30 to 90 kDa, pI 3.5 to 8.5
Spot 25α: Molecular weight 20 to 90 kDa, pI 3.5 to 7.5
Spot 26α: Molecular weight 20 to 90 kDa, pI 3.5 to 7.5
Spot 27α: Molecular weight 20 to 90 kDa, pI 3.5 to 7.5
Spot 28α: Molecular weight 10 to 70 kDa, pI 3.5 to 7.5
Spot 29α, 30α, 31α, 32α, 33α: Molecular weight 10 to 70 kDa, pI 3.5 to 8.5
Spot 34α: Molecular weight 10 to 70 kDa, pI 5.5 to 10.5
Spot 35α: Molecular weight 20 to 90 kDa, pI 5.5 to 10.5
Spot 36α, 37α: Molecular weight 10 to 70 kDa, pI 3.5 to 8.5
Spot 38α: Molecular weight 70 to 170 kDa, pI 5.5 to 10.5
Spot 39α: Molecular weight 5 to 60 kDa, pI 5.5 to 10.5
Spot 40α, 56α: Molecular weight 5 to 60 kDa, pI 5.5 to 10.5
Spot 41α: Molecular weight 5 to 60 kDa, pI 5.5 to 10.5
Spot 42α, 43α: Molecular weight 5 to 60 kDa, pI 5.5 to 10.5
Spot 45α: Molecular weight 2 to 50 kDa, pI 3.5 to 7.5
Spot 46α: Molecular weight 2 to 50 kDa, pI 3.5 to 7.5
Spot 47α: Molecular weight 5 to 50 kDa, pI 3.5 to 7.5
Spot 48α: Molecular weight 2 to 50 kDa, pI 3.5 to 8.5
Spot 50α: Molecular weight 2 to 50 kDa, pI 2.5 to 6.5
Spot 51α: Molecular weight 5 to 60 kDa, pI 2.5 to 6.5
Spot 52α: Molecular weight 10 to 70 kDa, pI 3.5 to 7.5
Spot 53α: Molecular weight 5 to 60 kDa, pI 3.5 to 8.5
Spot 54α: Molecular weight 5 to 60 kDa, pI 3.5 to 8.5
Spot 55α: Molecular weight 30 to 90 kDa, pI 5.5 to 10.5

[0538] Antigen

[0539] (1) Antigen in Spot 1

[0540] As the result of sequence identification of the antigen in spot 1 by mass spectroscopy, the following amino acid sequences were detected.

(SEQ ID NO: 17)

DQSSSYDDDEYSK

(SEQ ID NO: 18)

KSDQSSSYDDDEYSK

(SEQ ID NO: 19)

SDQSSSYDDDEYSK

(SEQ ID NO: 20)

SYDDDEYSK

[0541] Also, the mass spectroscopic data obtained for spot 1 on a mass spectrometer was analyzed by comparing the data against the Uniprot protein data, and as a result, the antigen in question was identified as Bowman-Birk type proteinase inhibitor D-II (amino acid sequence: SEQ ID NO: 2, encoding nucleotide sequence: SEQ ID NO: 1).

[0542] Accordingly, in the present invention, the antigen in spot 1 can be any of (1A-a) to (1A-e) and (1B) as defined below:

(1A-a) a protein comprising an amino acid sequence with deletion, substitution, insertion or addition of one or several amino acids in SEQ ID NO: 2;
(1A-b) a protein comprising an amino acid sequence having at least 70%, preferably at least 75%, at least 80%, at least 85%, at least 90%, at least 95%, at least 97%, at least 98%, or at least 99% identity to the amino acid sequence of SEQ ID NO: 2;
(1A-c) a protein comprising an amino acid sequence encoded by a nucleotide sequence with deletion, substitution, insertion or addition of one or several nucleotides in SEQ ID NO: 1;
(1A-d) a protein comprising an amino acid sequence encoded by a nucleotide sequence having at least 70%, preferably at least 75%, at least 80%, at least 85%, at least 90%, at least 95%, at least 97%, at least 98%, or at least 99% identity to the nucleotide sequence of SEQ ID NO: 1;

[0543] (1A-e) a protein comprising an amino acid sequence encoded by a nucleic acid that hybridizes under stringent conditions with a nucleic acid having a nucleotide sequence complementary to the nucleotide sequence of SEQ ID NO: 1;

(1B) a protein comprising at least one amino acid sequence selected from the group consisting of SEQ ID NOs: 17-20, preferably a protein comprising at least 2 or 3 or all sequences of the amino acid sequences; more preferably a protein comprising at least one amino acid sequence selected from the group consisting of SEQ ID NOs: 17-19, preferably a protein comprising at least 2 or all sequences of the amino acid sequences. As referred to above, the amino acid sequence of any of SEQ ID NOs: 17-20 may be an amino acid sequence derived therefrom by deletion, substitution, insertion or addition of one or several amino acids.

[0544] The proteins of (1A-a) to (1A-e) and (1B) as defined above also include those proteins whose amino acid residues are modified by phosphorylation, sugar chain modification, aminoacylation, ring-opening, deamination or the like.

[0545] The proteins of (1A-a) to (1A-e) and (1B) as defined above can be proteins that are found in a protein spot with a molecular weight of around 1 to 30 kDa, preferably around 2 to 25 kDa, more preferably around 5 to 20 kDa and an isoelectric point of 3.0 to 7.0, preferably 4.0 to 6.0 on gels used in the two-dimensional electrophoresis performed under the conditions described above in the subsection titled “Identification of antigens”.

[0546] Preferably, a protein that is an antigen in spot 1 has activity equivalent to that of the protein having the amino acid sequence of SEQ ID NO: 2 (Bowman-Birk type proteinase inhibitor D-II) or causative of an allergy to soybean.

[0547] (2) Antigen in Spot 2

[0548] As the result of sequence identification of the antigen in spot 2 by mass spectroscopy, the following amino acid sequences were detected.

(SEQ ID NO: 21)

ALRALRLEDLRIPTAYIK

(SEQ ID NO: 22)

ALRLSGGDHVHAGTVVGK

(SEQ ID NO: 23)

LEGEREITLGFVDLLRDDFVEK

(SEQ ID NO: 24)

LRLEDLRIPTAYIK

(SEQ ID NO: 25)

LTYYTPDYETK

(SEQ ID NO: 26)

TDGLTSLDRYK

(SEQ ID NO: 27)

TFQGPPHGIQVERD

(SEQ ID NO: 28)

TFQGPPHGIQVERDK

[0549] Also, the mass spectroscopic data obtained for spot 2 on a mass spectrometer was analyzed by comparing the data against the Uniprot protein data, and as a result, the antigen in question was identified as Ribulose bisphosphate carboxylase large chain (amino acid sequence: SEQ ID NO: 4, encoding nucleotide sequence: SEQ ID NO: 3).

[0550] Accordingly, in the present invention, the antigen in spot 2 can be any of (2A-a) to (2A-e) and (2B) as defined below:

(2A-a) a protein comprising an amino acid sequence with deletion, substitution, insertion or addition of one or several amino acids in SEQ ID NO: 4;
(2A-b) a protein comprising an amino acid sequence having at least 70%, preferably at least 75%, at least 80%, at least 85%, at least 90%, at least 95%, at least 97%, at least 98%, or at least 99% identity to the amino acid sequence of SEQ ID NO: 4;
(2A-c) a protein comprising an amino acid sequence encoded by a nucleotide sequence with deletion, substitution, insertion or addition of one or several nucleotides in SEQ ID NO: 3;
(2A-d) a protein comprising an amino acid sequence encoded by a nucleotide sequence having at least 70%, preferably at least 75%, at least 80%, at least 85%, at least 90%, at least 95%, at least 97%, at least 98%, or at least 99% identity to the nucleotide sequence of SEQ ID NO: 3;
(2A-e) a protein comprising an amino acid sequence encoded by a nucleic acid that hybridizes under stringent conditions with a nucleic acid having a nucleotide sequence complementary to the nucleotide sequence of SEQ ID NO: 3;
(2B) a protein comprising at least one amino acid sequence selected from the group consisting of SEQ ID NOs: 21-28, preferably a protein comprising at least 2, 3, 4, 5, 6 or 7 or all sequences of the amino acid sequences. As referred to above, the amino acid sequence of any of SEQ ID NOs: 21-28 may be an amino acid sequence derived therefrom by deletion, substitution, insertion or addition of one or several amino acids.

[0551] The proteins of (2A-a) to (2A-e) and (2B) as defined above also include those proteins whose amino acid residues are modified by phosphorylation, sugar chain modification, aminoacylation, ring-opening, deamination or the like.

[0552] The proteins of (2A-a) to (2A-e) and (2B) as defined above can be proteins that are found in a protein spot with a molecular weight of around 30 to 75 kDa, preferably around 37 to 70 kDa, more preferably around 40 to 60 kDa and an isoelectric point of 4.0 to 8.5, preferably 5.5 to 7.5 on gels used in the two-dimensional electrophoresis performed under the conditions described above in the subsection titled “Identification of antigens”.

[0553] Preferably, a protein that is an antigen in spot 2 has activity equivalent to that of the protein having the amino acid sequence of SEQ ID NO: 4 (Ribulose bisphosphate carboxylase large chain) or causative of an allergy to soybean.

[0554] (3) Antigen in Spot 3

[0555] As the result of sequence identification of the antigen in spot 3 by mass spectroscopy, the following amino acid sequences were detected.

(SEQ ID NO: 29)

APHTEDAIRVTQSTANFFISEARK

(SEQ ID NO: 30)

FVESGGARVIPLIYNESPENLNK

[0556] Also, the mass spectroscopic data obtained for spot 3 on a mass spectrometer was analyzed by comparing the data against the Uniprot protein data, and as a result, the antigen in question was identified as Gamma-glutamyl hydrolase (amino acid sequence: SEQ ID NO: 6, encoding nucleotide sequence: SEQ ID NO: 5).

[0557] Accordingly, in the present invention, the antigen in spot 3 can be any of (3A-a) to (3A-e) and (3B) as defined below:

(3A-a) a protein comprising an amino acid sequence with deletion, substitution, insertion or addition of one or several amino acids in SEQ ID NO: 6;
(3A-b) a protein comprising an amino acid sequence having at least 70%, preferably at least 75%, at least 80%, at least 85%, at least 90%, at least 95%, at least 97%, at least 98%, or at least 99% identity to the amino acid sequence of SEQ ID NO: 6;
(3A-c) a protein comprising an amino acid sequence encoded by a nucleotide sequence with deletion, substitution, insertion or addition of one or several nucleotides in SEQ ID NO: 5;
(3A-d) a protein comprising an amino acid sequence encoded by a nucleotide sequence having at least 70%, preferably at least 75%, at least 80%, at least 85%, at least 90%, at least 95%, at least 97%, at least 98%, or at least 99% identity to the nucleotide sequence of SEQ ID NO: 5.
(3A-e) a protein comprising an amino acid sequence encoded by a nucleic acid that hybridizes under stringent conditions with a nucleic acid having a nucleotide sequence complementary to the nucleotide sequence of SEQ 1D NO: 5;
(3B) a protein comprising an amino acid sequence of SEQ ID NO: 29 or 30, preferably a protein comprising the amino acid sequences of SEQ ID NO: 29 and 30. As referred to above, the amino acid sequence(s) of SEQ ID NOs: 29 and/or 30 may be an amino acid sequence(s) derived therefrom by deletion, substitution, insertion or addition of one or several amino acids.

[0558] The proteins of (3A-a) to (3A-e) and (3B) as defined above also include those proteins whose amino acid residues are modified by phosphorylation, sugar chain modification, aminoacylation, ring-opening, deamination or the like.

[0559] The proteins of (3A-a) to (3A-e) and (3B) as defined above can be proteins that are found in a protein spot with a molecular weight of around 20 to 50 kDa, preferably around 25 to 40 kDa, more preferably around 25 to 37 kDa and an isoelectric point of 7.0 to 12.0, preferably 8.0 to 10.0 on gels used in the two-dimensional electrophoresis performed under the conditions described above in the subsection titled “Identification of antigens”.

[0560] Preferably, a protein that is an antigen in spot 3 has activity equivalent to that of the protein having the amino acid sequence of SEQ ID NO: 6 (Gamma-glutamyl hydrolase) or causative of an allergy to soybean.

[0561] (4) Antigen in Spot 4

[0562] As the result of sequence identification of the antigen in spot 4 by mass spectroscopy, the following amino acid sequences were detected.

(SEQ ID NO: 31)

IWDLESK

(SEQ ID NO: 32)

SIVEDLK

[0563] Also, the mass spectroscopic data obtained for spot 4 on a mass spectrometer was analyzed by comparing the data against the Uniprot protein data, and as a result, the antigen in question was identified as Guanine nucleotide-binding protein subunit beta-like protein (amino acid sequence: SEQ ID NO: 8, encoding nucleotide sequence: SEQ ID NO: 7).

[0564] Accordingly, in the present invention, the antigen in spot 4 can be any of (4-a) to (4-e) and (4B) as defined below:

(4-a) a protein comprising an amino acid sequence with deletion, substitution, insertion or addition of one or several amino acids in SEQ ID NO: 8;
(4-b) a protein comprising an amino acid sequence having at least 70%, preferably at least 75%, at least 80%, at least 85%, at least 90%, at least 95%, at least 97%, at least 98%, or at least 99% identity to the amino acid sequence of SEQ ID NO: 8;
(4-c) a protein comprising an amino acid sequence encoded by a nucleotide sequence with deletion, substitution, insertion or addition of one or several nucleotides in SEQ ID NO: 7;
(4A-d) a protein comprising an amino acid sequence encoded by a nucleotide sequence having at least 70%, preferably at least 75%, at least 80%, at least 85%, at least 90%, at least 95%, at least 97%, at least 98%, or at least 99% identity to the nucleotide sequence of SEQ ID NO: 7;
(4A-e) a protein comprising an amino acid sequence encoded by a nucleic acid that hybridizes under stringent conditions with a nucleic acid having a nucleotide sequence complementary to the nucleotide sequence of SEQ ID NO: 7;
(4B) a protein comprising an amino acid sequence of SEQ ID NO: 31 or 32, preferably a protein comprising the amino acid sequences of SEQ ID NO: 31 and 32. As referred to above, the amino acid sequence(s) of SEQ ID NOs: 31 and/or 32 may be an amino acid sequence(s) derived therefrom by deletion, substitution, insertion or addition of one or several amino acids.

[0565] The proteins of (4A-a) to (4A-e) and (4B) as defined above also include those proteins whose amino acid residues are modified by phosphorylation, sugar chain modification, aminoacylation, ring-opening, deamination or the like.

[0566] The proteins of (4A-a) to (4A-e) and (4B) as defined above can be proteins that are found in a protein spot with a molecular weight of around 20 to 50 kDa, preferably around 25 to 40 kDa, more preferably around 25 to 37 kDa and an isoelectric point of 6.0 to 10.0, preferably 7.0 to 9.0 on gels used in the two-dimensional electrophoresis performed under the conditions described above in the subsection titled “Identification of antigens”.

[0567] Preferably, a protein that is an antigen in spot 4 has activity equivalent to that of the protein having the amino acid sequence of SEQ ID NO: 8 (Guanine nucleotide-binding protein subunit beta-like protein) or causative of an allergy to soybean.

[0568] (5) Antigen in Spot 5

[0569] As the result of sequence identification of the antigen in spot 5 by mass spectroscopy, the following amino acid sequences were detected.

(SEQ ID NO: 33)

QELDERARQGETVVPGGTGGK

(SEQ ID NO: 34)

SGEERAQEEAIDIDESK

[0570] Also, the mass spectroscopic data obtained for spot 5 on a mass spectrometer was analyzed by comparing the data against the Uniprot protein data, and as a result, the antigen in question was identified as Protein SLE3 (amino acid sequence: SEQ ID NO: 10, encoding nucleotide sequence: SEQ ID NO: 9).

[0571] Accordingly, in the present invention, the antigen in spot 5 can be any of (5A-a) to (5A-e) and (5B) as defined below:

(5A-a) a protein comprising an amino acid sequence with deletion, substitution, insertion or addition of one or several amino acids in SEQ ID NO: 10;
(5A-b) a protein comprising an amino acid sequence having at least 70%, preferably at least 75%, at least 80%, at least 85%, at least 90%, at least 95%, at least 97%, at least 98%, or at least 99% identity to the amino acid sequence of SEQ ID NO: 10;
(5A-c) a protein comprising an amino acid sequence encoded by a nucleotide sequence with deletion, substitution, insertion or addition of one or several nucleotides in SEQ ID NO: 9;
(5A-d) a protein comprising an amino acid sequence encoded by a nucleotide sequence having at least 70%, preferably at least 75%, at least 80%, at least 85%, at least 90%, at least 95%, at least 97%, at least 98%, or at least 99% identity to the nucleotide sequence of SEQ ID NO: 9;
(5A-e) a protein comprising an amino acid sequence encoded by a nucleic acid that hybridizes under stringent conditions with a nucleic acid having a nucleotide sequence complementary to the nucleotide sequence of SEQ ID NO: 9;
(5B) a protein comprising an amino acid sequence of SEQ ID NO: 33 or 34, preferably a protein comprising the amino acid sequences of SEQ ID NO: 33 and 34. As referred to above, the amino acid sequence(s) of SEQ ID NOs: 33 and/or 34 may be an amino acid sequence(s) derived therefrom by deletion, substitution, insertion or addition of one or several amino acids.

[0572] The proteins of (5A-a) to (5A-e) and (5B) as defined above also include those proteins whose amino acid residues are modified by phosphorylation, sugar chain modification, aminoacylation, ring-opening, deamination or the like.

[0573] The proteins of (5A-a) to (5A-e) and (5B) as defined above can be proteins that are found in a protein spot with a molecular weight of around 2 to 30 kDa, preferably around 3 to 25 kDa, more preferably around 5 to 20 kDa and an isoelectric point of 4.0 to 9.0, preferably 5.0 to 7.0 on gels used in the two-dimensional electrophoresis performed under the conditions described above in the subsection titled “Identification of antigens”.

[0574] Preferably, a protein that is an antigen in spot 5 has activity equivalent to that of the protein having the amino acid sequence of SEQ ID NO: 10 (Protein SLE3) or causative of an allergy to soybean.

[0575] (6) Antigen in Spot 6

[0576] As the result of sequence identification of the antigen in spot 6 by mass spectroscopy, the following amino acid sequences were detected.

(SEQ ID NO: 35)

AAAHVVEGAAGYAGHK

(SEQ ID NO: 36)

AKDYTLQAAEK

(SEQ ID NO: 37)

ARETHELGAHFESLADK

(SEQ ID NO: 38)

ATAVGWAAAHFSAEK

(SEQ ID NO: 39)

DTPQGSIEALQAGERVK

(SEQ ID NO: 40)

DYTLQAAEK

(SEQ ID NO: 41)

EEAQRELEAK

(SEQ ID NO: 42)

EGTGSIVFTAIGETVSSAGEK

(SEQ ID NO: 43)

ERGRESGGQVVAEK

(SEQ ID NO: 44)

GLAASAGETAK

(SEQ ID NO: 45)

GQQGYAVTK

(SEQ ID NO: 46)

KPSQPQEAEERPSEGIGETVRQYAQK

(SEQ ID NO: 47)

PAEIVQER

(SEQ ID NO: 48)

PQGSIEALQAGERVK

(SEQ ID NO: 49)

QAASETLNTTTQTAQEK

(SEQ ID NO: 50)

SAGGTTASYVGEK

(SEQ ID NO: 51)

SLTSIGEK

(SEQ ID NO: 52)

TPQGSIEALQAGERVK

(SEQ ID NO: 53)

VTDHAAANVVGNK

[0577] Also, the mass spectroscopic data obtained for spot 6 on a mass spectrometer was analyzed by comparing the data against the Uniprot protein data, and as a result, the antigen in question was identified as Seed biotin-containing protein SBP65 (amino acid sequence: SEQ ID NO: 12, encoding nucleotide sequence: SEQ ID NO: 11).

[0578] Accordingly, in the present invention, the antigen in spot 6 can be any of (6A-a) to (6A-e) and (6B) as defined below:

(6A-a) a protein comprising an amino acid sequence with deletion, substitution, insertion or addition of one or several amino acids in SEQ ID NO: 12;
(6A-b) a protein comprising an amino acid sequence having at least 70%, preferably at least 75%, at least 80%, at least 85%, at least 90%, at least 95%, at least 97%, at least 98%, or at least 99% identity to the amino acid sequence of SEQ ID NO: 12;
(6A-c) a protein comprising an amino acid sequence encoded by a nucleotide sequence with deletion, substitution, insertion or addition of one or several nucleotides in SEQ ID NO: 11;
(6A-d) a protein comprising an amino acid sequence encoded by a nucleotide sequence having at least 70%, preferably at least 75%, at least 80%, at least 85%, at least 90%, at least 95%, at least 97%, at least 98%, or at least 99% identity to the nucleotide sequence of SEQ ID NO: 11;
(6A-e) a protein comprising an amino acid sequence encoded by a nucleic acid that hybridizes under stringent conditions with a nucleic acid having a nucleotide sequence complementary to the nucleotide sequence of SEQ ID NO: 11;
(6B) a protein comprising at least one amino acid sequence selected from the group consisting of SEQ ID NOs: 35-53, preferably a protein comprising at least 2, 3, 4, 5, 6, 7, 8, 9, 10, 11, 12, 13, 14, 15, 16, 17 or 18 or all sequences of the amino acid sequences; more preferably a protein comprising at least one amino acid sequence selected from the group consisting of SEQ ID NOs: 35-39, 41-44, 46, 48-50, 52 and 53, preferably a protein comprising at least 2, 3, 4, 5, 6, 7, 8, 9, 10, 11, 12, 13 or 14 or all sequences of the amino acid sequences. As referred to above, the amino acid sequence of any of SEQ ID NOs: 35-53 may be an amino acid sequence derived therefrom by deletion, substitution, insertion or addition of one or several amino acids.

[0579] The proteins of (6A-a) to (6A-e) and (6B) as defined above also include those proteins whose amino acid residues are modified by phosphorylation, sugar chain modification, aminoacylation, ring-opening, deamination or the like.

[0580] The proteins of (6A-a) to (6A-e) and (6B) as defined above can be proteins that are found in a protein spot with a molecular weight of around 50 to 100 kDa, preferably around 55 to 90 kDa, more preferably around 60 to 75 kDa and an isoelectric point of 5.0 to 10.0, preferably 6.0 to 8.0 on gels used in the two-dimensional electrophoresis performed under the conditions described above in the subsection titled “Identification of antigens”.

[0581] Preferably, a protein that is an antigen in spot 6 has activity equivalent to that of the protein having the amino acid sequence of SEQ ID NO: 12 (Seed biotin-containing protein SBP65) or causative of an allergy to soybean.

[0582] (7) Antigen in Spot 7

[0583] As the result of sequence identification of the antigen in spot 7 by mass spectroscopy, the following amino acid sequences were detected.

(SEQ ID NO: 54)

AASNAPAPLAGVIFEPFQELKK

(SEQ ID NO: 55)

ASNAPAPLAGVIFEPFQELKK

(SEQ ID NO: 56)

FFKESSEEEREHAEQLIK

(SEQ ID NO: 57)

GHGVWHFDQK

(SEQ ID NO: 58)

IAEYVAQLRLVGK

(SEQ ID NO: 59)

KIAEYVAQLRLVGK

(SEQ ID NO: 60)

LLHDEDHV

(SEQ ID NO: 61)

SNAPAPLAGVIFEPFQELKK

[0584] Also, the mass spectroscopic data obtained for spot 7 on a mass spectrometer was analyzed by comparing the data against the Uniprot protein data, and as a result, the antigen in question was identified as Ferritin-2 (amino acid sequence: SEQ ID NO: 14, encoding nucleotide sequence: SEQ ID NO: 13).

[0585] Accordingly, in the present invention, the antigen in spot 7 can be any of (7A-a) to (7A-e) and (7B) as defined below:

(7A-a) a protein comprising an amino acid sequence with deletion, substitution, insertion or addition of one or several amino acids in SEQ ID NO: 14;
(7A-b) a protein comprising an amino acid sequence having at least 70%, preferably at least 75%, at least 80%, at least 85%, at least 90%, at least 95%, at least 97%, at least 98%, or at least 99% identity to the amino acid sequence of SEQ ID NO: 14;
(7A-c) a protein comprising an amino acid sequence encoded by a nucleotide sequence with deletion, substitution, insertion or addition of one or several nucleotides in SEQ ID NO: 13;
(7A-d) a protein comprising an amino acid sequence encoded by a nucleotide sequence having at least 70%, preferably at least 75%, at least 80%, at least 85%, at least 90%, at least 95%, at least 97%, at least 98%, or at least 99% identity to the nucleotide sequence of SEQ ID NO: 13;
(7A-e) a protein comprising an amino acid sequence encoded by a nucleic acid that hybridizes under stringent conditions with a nucleic acid having a nucleotide sequence complementary to the nucleotide sequence of SEQ ID NO: 13;
(7B) a protein comprising at least one amino acid sequence selected from the group consisting of SEQ ID NOs: 54-61, preferably a protein comprising at least 2, 3, 4, 5, 6 or 7 or all sequences of the amino acid sequences; more preferably a protein comprising at least one amino acid sequence selected from the group consisting of SEQ ID NOs: 54-59 and 61, preferably a protein comprising at least 2, 3, 4, 5 or 6 or all sequences of the amino acid sequences. As referred to above, the amino acid sequence of any of SEQ ID NOs: 54-61 may be an amino acid sequence derived therefrom by deletion, substitution, insertion or addition of one or several amino acids.

[0586] The proteins of (7A-a) to (7A-e) and (7B) as defined above also include those proteins whose amino acid residues are modified by phosphorylation, sugar chain modification, aminoacylation, ring-opening, deamination or the like.

[0587] The proteins of (7A-a) to (7A-e) and (7B) as defined above can be proteins that are found in a protein spot with a molecular weight of around 5 to 37 kDa, preferably around 10 to 30 kDa, more preferably around 15 to 25 kDa and an isoelectric point of 3.0 to 7.0, preferably 4.0 to 6.0 on gels used in the two-dimensional electrophoresis performed under the conditions described above in the subsection titled “Identification of antigens”.

[0588] Preferably, a protein that is an antigen in spot 7 has activity equivalent to that of the protein having the amino acid sequence of SEQ ID NO: 14 (Ferritin-2) or causative of an allergy to soybean.

[0589] (8) Antigen in Spot 8

[0590] As the result of sequence identification of the antigen in spot 8 by mass spectroscopy, the following amino acid sequences were detected.

(SEQ ID NO: 62)

AGESESNLRK

(SEQ ID NO: 63)

GESEANVREIFDK

(SEQ ID NO: 64)

GILLYGPPGSGK

(SEQ ID NO: 65)

LAGESESNLRK

(SEQ ID NO: 66)

LSDDVDLERIAK

(SEQ ID NO: 67)

RELQETVQYPVEHPEK

(SEQ ID NO: 68)

TVFIIGATNRPDIID

[0591] Also, the mass spectroscopic data obtained for spot 8 on a mass spectrometer was analyzed by comparing the data against the Uniprot protein data, and as a result, the antigen in question was identified as Cell division cycle protein 48 homolog (amino acid sequence: SEQ ID NO: 16, encoding nucleotide sequence: SEQ ID NO: 15).

[0592] Accordingly, in the present invention, the antigen in spot 8 can be any of (8A-a) to (8A-e) and (8B) as defined below:

(8A-a) a protein comprising an amino acid sequence with deletion, substitution, insertion or addition of one or several amino acids in SEQ ID NO: 16;
(8A-b) a protein comprising an amino acid sequence having at least 70%, preferably at least 75%, at least 80%, at least 85%, at least 90%, at least 95%, at least 97%, at least 98%, or at least 99% identity to the amino acid sequence of SEQ ID NO: 16;
(8A-c) a protein comprising an amino acid sequence encoded by a nucleotide sequence with deletion, substitution, insertion or addition of one or several nucleotides in SEQ ID NO: 15;
(8A-d) a protein comprising an amino acid sequence encoded by a nucleotide sequence having at least 70%, preferably at least 75%, at least 80%, at least 85%, at least 90%, at least 95%, at least 97%, at least 98%, or at least 99% identity to the nucleotide sequence of SEQ ID NO: 15;
(8A-e) a protein comprising an amino acid sequence encoded by a nucleic acid that hybridizes under stringent conditions with a nucleic acid having a nucleotide sequence complementary to the nucleotide sequence of SEQ 1D NO: 15;
(8B) a protein comprising at least one amino acid sequence selected from the group consisting of SEQ ID NOs: 62-68, preferably a protein comprising at least 2, 3, 4, 5 or 6 or all sequences of the amino acid sequences. As referred to above, the amino acid sequence of any of SEQ ID NOs: 62-68 may be an amino acid sequence derived therefrom by deletion, substitution, insertion or addition of one or several amino acids.

[0593] The proteins of (8A-a) to (8A-e) and (8B) as defined above also include those proteins whose amino acid residues are modified by phosphorylation, sugar chain modification, aminoacylation, ring-opening, deamination or the like.

[0594] The proteins of (8A-a) to (8A-e) and (8B) as defined above can be proteins that are found in a protein spot with a molecular weight of around 75 to 200 kDa, preferably around 100 to 170 kDa, more preferably around 100 to 150 kDa and an isoelectric point of 3.0 to 7.0, preferably 4.0 to 6.0 on gels used in the two-dimensional electrophoresis performed under the conditions described above in the subsection titled “Identification of antigens”.

[0595] Preferably, a protein that is an antigen in spot 8 has activity equivalent to that of the protein having the amino acid sequence of SEQ ID NO: 16 (Cell division cycle protein 48 homolog) or causative of an allergy to soybean.

[0596] (1α) Antigen in Spot 1α

[0597] As the result of sequence identification of the antigen in spot 1α by mass spectroscopy, the following amino acid sequences were detected.

(SEQ ID NO: 71)

APQDLYESYYNANK

(SEQ ID NO: 72)

AVLFVPPK

(SEQ ID NO: 73)

DFASRIYDSVK

(SEQ ID NO: 74)

DIFLRELISNASDALDK

(SEQ ID NO: 75)

DIFYITGTSK

(SEQ ID NO: 76)

DNVDDVK

(SEQ ID NO: 77)

EDSKPETDAVNDDNDVK

(SEQ ID NO: 78)

EEAGEYLEESK

(SEQ ID NO: 79)

EQLENSPFLERLK

(SEQ ID NO: 80)

EVLGEGDNTK

(SEQ ID NO: 81)

EVTEEEYTK

(SEQ ID NO: 82)

FYHSLAK

(SEQ ID NO: 83)

IGAVPHGLSTDSDVVK

(SEQ ID NO: 84)

LGIIEDATNRNRLAK

(SEQ ID NO: 85)

NPEDEGVK

(SEQ ID NO: 86)

SGTSAFVEK

(SEQ ID NO: 87)

TSLDISPEATVEEEDDTEVEAESDAK

(SEQ ID NO: 90)

APQDLYESYYNANK

(SEQ ID NO: 91)

AVLFVPPK

(SEQ ID NO: 92)

DFASRIYDSVK

(SEQ ID NO: 93)

DIFLRELISNASDALDK

(SEQ ID NO: 94)

DIFYITGTSK

(SEQ ID NO: 95)

DNVDDVK

(SEQ ID NO: 96)

DVLGEGDNTK

(SEQ ID NO: 97)

EEAGEYLQESK

(SEQ ID NO: 98)

EQLENSPFLERLK

(SEQ ID NO: 99)

EVTEEEYTK

(SEQ ID NO: 100)

FYHSLAK

(SEQ ID NO: 101)

IGAVPHGLSTDSDVVK

(SEQ ID NO: 102)

LGIIEDATNRNRLAK

(SEQ ID NO: 103)

NPEDEGVK

(SEQ ID NO: 104)

SGTSAFVEK

[0598] Also, the mass spectroscopic data obtained for spot 1α on a mass spectrometer was analyzed by comparing the data against the NCBI protein data, and as a result, endoplasmin homolog isoform X2 (amino acid sequence: SEQ ID NO: 70, encoding nucleotide sequence: SEQ ID NO: 69) was identified as a protein comprising any of SEQ ID NOs: 71 to 87 and endoplasmin homolog isoform X2 (amino acid sequence: SEQ ID NO: 89, encoding nucleotide sequence: SEQ ID NO: 88) was identified as a protein comprising any of SEQ ID NOs: 90 to 104.

[0599] Accordingly, the antigen in spot 1α in the present invention can be any of proteins selected from the group consisting of the proteins as defined below in (1αA1-a) to (1αA1-e), (1αB1), (1αA2-a) to (1αA2-e), and (1αB2):

(1αA1-a) a protein comprising an amino acid sequence with deletion, substitution, insertion or addition of one or several amino acids in SEQ ID NO: 70;
(1αA1-b) a protein comprising an amino acid sequence having at least 70%, preferably at least 75%, at least 80%, at least 85%, at least 90%, at least 95%, at least 97%, at least 98%, or at least 99% identity to the amino acid sequence of SEQ ID NO: 70;
(1αA1-c) a protein comprising an amino acid sequence encoded by a nucleotide sequence with deletion, substitution, insertion or addition of one or several nucleotides in SEQ ID NO: 69;
(1αA1-d) a protein comprising an amino acid sequence encoded by a nucleotide sequence having at least 70%, preferably at least 75%, at least 80%, at least 85%, at least 90%, at least 95%, at least 97%, at least 98%, or at least 99% identity to the nucleotide sequence of SEQ ID NO: 69;
(1αA1-e) a protein comprising an amino acid sequence encoded by a nucleic acid that hybridizes under stringent conditions with a nucleic acid having a nucleotide sequence complementary to the nucleotide sequence of SEQ ID NO: 69;
(1αB1) a protein comprising at least one amino acid sequence selected from the group consisting of SEQ ID NOs: 71-87, preferably a protein comprising at least 2, 3, 4, 5, 6, 7, 8, 9, 10, 11, 12, 13, 14, 15, or 16 or all sequences of the amino acid sequences. As referred to above, the amino acid sequence of any of SEQ ID NOs: 71 to 87 may be an amino acid sequence derived therefrom by deletion, substitution, insertion or addition of one or several amino acids;
(1αA2-a) a protein comprising an amino acid sequence with deletion, substitution, insertion or addition of one or several amino acids in SEQ ID NO: 89;
(1αA2-b) a protein comprising an amino acid sequence having at least 70%, preferably at least 75%, at least 80%, at least 85%, at least 90%, at least 95%, at least 97%, at least 98%, or at least 99% identity to the amino acid sequence of SEQ ID NO: 89;
(1αA2-c) a protein comprising an amino acid sequence encoded by a nucleotide sequence with deletion, substitution, insertion or addition of one or several nucleotides in SEQ ID NO: 88;
(1αA2-d) a protein comprising an amino acid sequence encoded by a nucleotide sequence having at least 70%, preferably at least 75%, at least 80%, at least 85%, at least 90%, at least 95%, at least 97%, at least 98%, or at least 99% identity to the nucleotide sequence of SEQ ID NO: 88;
(1αA2-e) a protein comprising an amino acid sequence encoded by a nucleic acid that hybridizes under stringent conditions with a nucleic acid having a nucleotide sequence complementary to the nucleotide sequence of SEQ ID NO: 88;
(1αB2) a protein comprising at least one amino acid sequence selected from the group consisting of SEQ ID NOs: 90-104, preferably a protein comprising at least 2, 3, 4, 5, 6, 7, 8, 9, 10, 11, 12, 13, or 14 or all sequences of the amino acid sequences. As referred to above, the amino acid sequence of any of SEQ ID NOs: 71 to 87 may be an amino acid sequence derived therefrom by deletion, substitution, insertion or addition of one or several amino acids.

[0600] The protein selected from the group consisting of the proteins as defined above in (1αA1-a) to (1αA1-e), (1αB1), (1αA2-a) to (1αA2-e), and (1αB2) also include those proteins whose amino acid residues are modified by phosphorylation, sugar chain modification, aminoacylation, ring-opening, deamination or the like.

[0601] The protein selected from the group consisting of the proteins as defined above in (1αA1-a) to (1αA1-e), (1αB1), (1αA2-a) to (1αA2-e), and (1αB2) can be proteins that are found in a protein spot with a molecular weight of around 70 to 120 kDa, preferably around 80 to 110 kDa, and an isoelectric point of 2.5 to 6.5, preferably 3.0 to 6.0 on gels used in the two-dimensional electrophoresis performed under the conditions described above in the subsection titled “Identification of antigens”.

[0602] Preferably, a protein that is an antigen in spot 1α has activity equivalent to that of the protein having the amino acid sequence of SEQ ID NO: 70 or 89 (endoplasmin homolog isoform X2) or causative of an allergy to soybean.

[0603] (2α) Antigen in Spot 2α

[0604] As the result of sequence identification of the antigen in spot 2α by mass spectroscopy, the following amino acid sequences were detected.

(SEQ ID NO: 107)

ADLVNNLGTIARSGTK

(SEQ ID NO: 108)

AVENSPFLEK

(SEQ ID NO: 109)

EDQLEYLEERRLK

(SEQ ID NO: 110)

EEYAAFYK

(SEQ ID NO: 111)

EGQNDIYYITGESK

(SEQ ID NO: 112)

EIFLRELISNASDALDK

(SEQ ID NO: 113)

FYEAFSK

(SEQ ID NO: 114)

HFSVEGQLEFK

(SEQ ID NO: 115)

IRFESLTDK

(SEQ ID NO: 116)

LAELLRYHSTK

(SEQ ID NO: 117)

LDESEDEK

(SEQ ID NO: 118)

LGIHEDSQNK

(SEQ ID NO: 119)

RAPFDLFDTRK

(SEQ ID NO: 120)

VEDVDEDK

(SEQ ID NO: 123)

ADLVNNLGTIARSGTK

(SEQ ID NO: 124)

AVENSPFLEK

(SEQ ID NO: 125)

EDQLEYLEERRLK

(SEQ ID NO: 126)

EEYSAFYK

(SEQ ID NO: 127)

EGQSDIYYITGESK

(SEQ ID NO: 128)

EIFLRELISNASDALDK

(SEQ ID NO: 129)

FYEAFSK

(SEQ ID NO: 130)

HFSVEGQLEFK

(SEQ ID NO: 131)

IAELLRYHSTK

(SEQ ID NO: 132)

IRFESLTDK

(SEQ ID NO: 133)

LDESEDEK

(SEQ ID NO: 134)

LGIHEDSQNK

(SEQ ID NO: 135)

RAPFDLFDTRK

(SEQ ID NO: 136)

SGDELTSLK

(SEQ ID NO: 137)

VEDVDEEK

(SEQ ID NO: 140)

ADLVNNLGTIARSGTK

(SEQ ID NO: 141)

AVENSPFLEK

(SEQ ID NO: 142)

EDQLEYLEERRLK

(SEQ ID NO: 143)

EEYAAFYK

(SEQ ID NO: 144)

EGQNDIYYITGESK

(SEQ ID NO: 145)

EIFLRELISNASDALDK

(SEQ ID NO: 146)

FYEAFSK

(SEQ ID NO: 147)

HFSVEGQLEFK

(SEQ ID NO: 148)

IRFESLTDK

(SEQ ID NO: 149)

LAELLRYHSTK

(SEQ ID NO: 150)

LDESEDEK

(SEQ ID NO: 151)

LGIHEDSQNK

(SEQ ID NO: 152)

RAPFDLFDTK

(SEQ ID NO: 153)

VEDVDEDK

[0605] Also, the mass spectroscopic data obtained for spot 2α on a mass spectrometer was analyzed by comparing the data against the NCBI protein data, and as a result, heat shock cognate protein 80 (amino acid sequence: SEQ ID NO: 106, encoding nucleotide sequence: SEQ ID NO: 105) was identified as a protein comprising any of SEQ ID NOs: 107 to 120, heat shock protein 90-1 (amino acid sequence: SEQ ID NO: 122, encoding nucleotide sequence: SEQ ID NO: 121) was identified as a protein comprising any of SEQ ID NOs: 123 to 137, and hypothetical protein GLYMA_02G302500 was identified as a protein comprising any of SEQ ID NOs: 140 to 153.

[0606] Accordingly, the antigen in spot 1α in the present invention can be any of proteins selected from the group consisting of the proteins as defined below in (2αA1-a) to (2αA1-e), (2αB1), (2αA2-a) to (2αA2-e), (2αB2), (2αA3-a) to (2αA3-e), and (2αB3):

(2αA1-a) a protein comprising an amino acid sequence with deletion, substitution, insertion or addition of one or several amino acids in SEQ ID NO: 106;
(2αA1-b) a protein comprising an amino acid sequence having at least 70%, preferably at least 75%, at least 80%, at least 85%, at least 90%, at least 95%, at least 97%, at least 98%, or at least 99% identity to the amino acid sequence of SEQ ID NO: 106;
(2αA1-c) a protein comprising an amino acid sequence encoded by a nucleotide sequence with deletion, substitution, insertion or addition of one or several nucleotides in SEQ ID NO: 105;
(2αA1-d) a protein comprising an amino acid sequence encoded by a nucleotide sequence having at least 70%, preferably at least 75%, at least 80%, at least 85%, at least 90%, at least 95%, at least 97%, at least 98%, or at least 99% identity to the nucleotide sequence of SEQ ID NO: 105;
(2αA1-e) a protein comprising an amino acid sequence encoded by a nucleic acid that hybridizes under stringent conditions with a nucleic acid having a nucleotide sequence complementary to the nucleotide sequence of SEQ ID NO: 105;
(2αB1) a protein comprising at least one amino acid sequence selected from the group consisting of SEQ ID NOs: 107-120, preferably a protein comprising at least 2, 3, 4, 5, 6, 7, 8, 9, 10, 11, 12, or 13 or all sequences of the amino acid sequences. As referred to above, the amino acid sequence of any of SEQ ID NOs: 107 to 120 may be an amino acid sequence derived therefrom by deletion, substitution, insertion or addition of one or several amino acids;
(2αA2-a) a protein comprising an amino acid sequence with deletion, substitution, insertion or addition of one or several amino acids in SEQ ID NO: 122;
(2αA2-b) a protein comprising an amino acid sequence having at least 70%, preferably at least 75%, at least 80%, at least 85%, at least 90%, at least 95%, at least 97%, at least 98%, or at least 99% identity to the amino acid sequence of SEQ ID NO: 122;
(2αA2-c) a protein comprising an amino acid sequence encoded by a nucleotide sequence with deletion, substitution, insertion or addition of one or several nucleotides in SEQ ID NO: 121;
(2αA2-d) a protein comprising an amino acid sequence encoded by a nucleotide sequence having at least 70%, preferably at least 75%, at least 80%, at least 85%, at least 90%, at least 95%, at least 97%, at least 98%, or at least 99% identity to the nucleotide sequence of SEQ ID NO: 121;
(2αA2-e) a protein comprising an amino acid sequence encoded by a nucleic acid that hybridizes under stringent conditions with a nucleic acid having a nucleotide sequence complementary to the nucleotide sequence of SEQ ID NO: 121;
(2αB2) a protein comprising at least one amino acid sequence selected from the group consisting of SEQ ID NOs: 123-137, preferably a protein comprising at least 2, 3, 4, 5, 6, 7, 8, 9, 10, 11, 12, 13, or 14 or all sequences of the amino acid sequences. As referred to above, the amino acid sequence of any of SEQ ID NOs: 123 to 137 may be an amino acid sequence derived therefrom by deletion, substitution, insertion or addition of one or several amino acids.
(2αA3-a) a protein comprising an amino acid sequence with deletion, substitution, insertion or addition of one or several amino acids in SEQ ID NO: 139;
(2αA3-b) a protein comprising an amino acid sequence having at least 70%, preferably at least 75%, at least 80%, at least 85%, at least 90%, at least 95%, at least 97%, at least 98%, or at least 99% identity to the amino acid sequence of SEQ ID NO: 139;
(2αA3-c) a protein comprising an amino acid sequence encoded by a nucleotide sequence with deletion, substitution, insertion or addition of one or several nucleotides in SEQ ID NO: 138;
(2αA3-d) a protein comprising an amino acid sequence encoded by a nucleotide sequence having at least 70%, preferably at least 75%, at least 80%, at least 85%, at least 90%, at least 95%, at least 97%, at least 98%, or at least 99% identity to the nucleotide sequence of SEQ ID NO: 138:
(2αA3-e) a protein comprising an amino acid sequence encoded by a nucleic acid that hybridizes under stringent conditions with a nucleic acid having a nucleotide sequence complementary to the nucleotide sequence of SEQ ID NO: 138;
(2αB3) a protein comprising at least one amino acid sequence selected from the group consisting of SEQ ID NOs: 140-153, preferably a protein comprising at least 2, 3, 4, 5, 6, 7, 8, 9, 10, 11, 12, or 13 or all sequences of the amino acid sequences. As referred to above, the amino acid sequence of any of SEQ ID NOs: 140 to 153 may be an amino acid sequence derived therefrom by deletion, substitution, insertion or addition of one or several amino acids.

[0607] The protein selected from the group consisting of the proteins as defined above in (2αA1-a) to (2αA1-e), (2αB1), (2αA2-a) to (2αA2-e), (2αB2), (2αA3-a) to (2αA3-e), and (2αB3) also include those proteins whose amino acid residues are modified by phosphorylation, sugar chain modification, aminoacylation, ring-opening, deamination or the like.

[0608] The protein selected from the group consisting of the proteins as defined above in (2αA1-a) to (2αA1-e), (2αB1), (2αA2-a) to (2αA2-e), (2αB2), (2αA3-a) to (2αA3-e), and (2αB3) can be proteins that are found in a protein spot with a molecular weight of around 50 to 120 kDa, preferably around 60 to 110 kDa, and an isoelectric point of 2.5 to 6.5, preferably 3.0 to 6.0 on gels used in the two-dimensional electrophoresis performed under the conditions described above in the subsection titled “Identification of antigens”.

[0609] Preferably, a protein that is an antigen in spot 2α has activity equivalent to that of the protein having the amino acid sequence of SEQ ID NO: 106 (heat shock cognate protein 80), the protein having the amino acid sequence of SEQ ID NO: 122 (heat shock protein 90-1), or the protein having the amino acid sequence of SEQ ID NO: 139 (hypothetical protein GLYMA_02G302500), or causative of an allergy to soybean.

[0610] (4α) Antigen in Spot 4α

[0611] As the result of sequence identification of the antigen in spot 4α by mass spectroscopy, the following amino acid sequences were detected.

(SEQ ID NO: 156)

AGGALSIAFVSK

(SEQ ID NO: 157)

DGLIVSIGK

[0612] Also, the mass spectroscopic data obtained for spot 4α on a mass spectrometer was analyzed by comparing the data against the NCBI protein data, and as a result, embryo-specific urease isoform X1 (amino acid sequence: SEQ ID NO: 155, encoding nucleotide sequence: SEQ ID NO: 154) was identified as a protein comprising SEQ ID NO: 156 or 157.

[0613] Accordingly, the antigens in spot 4α in the present invention can be any protein selected from the group consisting of the proteins as defined below in (4αA-a) to (4αA-e) and (4αB):

(4αA-a) a protein comprising an amino acid sequence with deletion, substitution, insertion or addition of one or several amino acids in SEQ ID NO: 155;
(4αA-b) a protein comprising an amino acid sequence having at least 70%, preferably at least 75%, at least 80%, at least 85%, at least 90%, at least 95%, at least 97%, at least 98%, or at least 99% identity to the amino acid sequence of SEQ ID NO: 155;
(4αA-c) a protein comprising an amino acid sequence encoded by a nucleotide sequence with deletion, substitution, insertion or addition of one or several nucleotides in SEQ ID NO: 154;
(4αA-d) a protein comprising an amino acid sequence encoded by a nucleotide sequence having at least 70%, preferably at least 75%, at least 80%, at least 85%, at least 90%, at least 95%, at least 97%, at least 98%, or at least 99% identity to the nucleotide sequence of SEQ ID NO: 154;
(4αA-e) a protein comprising an amino acid sequence encoded by a nucleic acid that hybridizes under stringent conditions with a nucleic acid having a nucleotide sequence complementary to the nucleotide sequence of SEQ ID NO: 154;
(4αB) a protein comprising at least one amino acid sequence selected from the group consisting of SEQ ID NOs: 156 and 157, preferably a protein comprising both the amino acid sequences. As referred to above, the amino acid sequence of any of SEQ ID NOs: 156 and 157 may be an amino acid sequence derived therefrom by deletion, substitution, insertion or addition of one or several amino acids.

[0614] The proteins selected from the group consisting of (4αA-a) to (4αA-e) and (4αB) as defined above also include those proteins whose amino acid residues are modified by phosphorylation, sugar chain modification, aminoacylation, ring-opening, deamination or the like.

[0615] The proteins selected from the group consisting of (4αA-a) to (4αA-e) and (4αB) as defined above can be proteins that are found in a protein spot with a molecular weight of around 70 to 120 kDa, preferably around 80 to 110 kDa and an isoelectric point of 3.5 to 7.5, preferably 4.0 to 7.0 on gels used in the two-dimensional electrophoresis performed under the conditions described above in the subsection titled “Identification of antigens”.

[0616] Preferably, a protein that is an antigen in spot 4α has activity equivalent to that of the protein having the amino acid sequence of SEQ ID NO: 155 (embryo-specific urease isoform X1) or causative of an allergy to soybean.

[0617] (5α) Antigen in Spot 5α

[0618] As the result of sequence identification of the antigen in spot 5α by mass spectroscopy, the following amino acid sequences were detected.

(SEQ ID NO: 160)

AFATYVQAK

(SEQ ID NO: 161)

QQEATTSLSSFTPDASSIASSIK

[0619] Also, the mass spectroscopic data obtained for spot 5α on a mass spectrometer was analyzed by comparing the data against the NCBI protein data, and as a result, alpha-1,4 glucan phosphorylase L isozyme, chloroplastic/amyloplastic (amino acid sequence: SEQ ID NO: 159, encoding nucleotide sequence: SEQ ID NO: 158) was identified as a protein comprising SEQ ID NO: 160 or 161.

[0620] Accordingly, the antigens in spot 5α in the present invention can be any protein selected from the group consisting of the proteins as defined below in (5αA-a) to (5αA-e) and (5αB):

(5αA-a) a protein comprising an amino acid sequence with deletion, substitution, insertion or addition of one or several amino acids in SEQ ID NO: 159;
(5αA-b) a protein comprising an amino acid sequence having at least 70%, preferably at least 75%, at least 80%, at least 85%, at least 90%, at least 95%, at least 97%, at least 98%, or at least 99% identity to the amino acid sequence of SEQ ID NO: 159;
(5αA-c) a protein comprising an amino acid sequence encoded by a nucleotide sequence with deletion, substitution, insertion or addition of one or several nucleotides in SEQ ID NO: 158;
(5αA-d) a protein comprising an amino acid sequence encoded by a nucleotide sequence having at least 70%, preferably at least 75%, at least 80%, at least 85%, at least 90%, at least 95%, at least 97%, at least 98%, or at least 99% identity to the nucleotide sequence of SEQ ID NO: 158;
(5αA-e) a protein comprising an amino acid sequence encoded by a nucleic acid that hybridizes under stringent conditions with a nucleic acid having a nucleotide sequence complementary to the nucleotide sequence of SEQ ID NO: 158;
(5αB) a protein comprising at least one amino acid sequence selected from the group consisting of SEQ ID NOs: 160 and 161, preferably a protein comprising both the amino acid sequences. As referred to above, the amino acid sequence of any of SEQ ID NOs: 160 and 161 may be an amino acid sequence derived therefrom by deletion, substitution, insertion or addition of one or several amino acids.

[0621] The proteins selected from the group consisting of (5αA-a) to (5αA-e) and (5αB) as defined above also include those proteins whose amino acid residues are modified by phosphorylation, sugar chain modification, aminoacylation, ring-opening, deamination or the like.

[0622] The proteins selected from the group consisting of (5αA-a) to (5αA-e) and (5αB) as defined above can be proteins that are found in a protein spot with a molecular weight of around 70 to 170 kDa, preferably around 80 to 160 kDa and an isoelectric point of 3.5 to 7.5, preferably 4.0 to 7.0 on gels used in the two-dimensional electrophoresis performed under the conditions described above in the subsection titled “Identification of antigens”.

[0623] Preferably, a protein that is an antigen in spot 5α has activity equivalent to that of the protein having the amino acid sequence of SEQ ID NO: 159 (alpha-1,4 glucan phosphorylase L isozyme, chloroplastic/amyloplastic) or causative of an allergy to soybean.

[0624] (6α) Antigen in Spot 6α

[0625] As the result of sequence identification of the antigen in spot 6α by mass spectroscopy, the following amino acid sequences were detected.

(SEQ ID NO: 164)

FLNGEVGPK

(SEQ ID NO: 165)

LSVFDAAEK

(SEQ ID NO: 166)

LSVFDVAEK

(SEQ ID NO: 167)

TSLAPGSGVVTK

(SEQ ID NO: 170)

FLNGEVGPK

(SEQ ID NO: 171)

LSVFDVAEK

(SEQ ID NO: 172)

TSLAPGSGVVTK

[0626] Also, the mass spectroscopic data obtained for spot 6α on a mass spectrometer was analyzed by comparing the data against the NCBI protein data, and as a result, aconitate hydratase 1 (amino acid sequence: SEQ ID NO: 163, encoding nucleotide sequence: SEQ ID NO: 162) was identified as a protein comprising any of SEQ ID NOs: 164 to 167 and aconitate hydratase 1 (amino acid sequence: SEQ ID NO: 169, encoding nucleotide sequence: SEQ ID NO: 168) was identified as a protein comprising any of SEQ ID NOs: 170 to 172.

[0627] Accordingly, the antigen in spot 6α in the present invention can be any of proteins selected from the group consisting of the proteins as defined below in (6αA1-a) to (6αA1-e), (6αB1), (6αA2-a) to (6αA2-e), and (6αB2):

(6αA1-a) a protein comprising an amino acid sequence with deletion, substitution, insertion or addition of one or several amino acids in SEQ ID NO: 163;
(6αA1-b) a protein comprising an amino acid sequence having at least 70%, preferably at least 75%, at least 80%, at least 85%, at least 90%, at least 95%, at least 97%, at least 98%, or at least 99% identity to the amino acid sequence of SEQ ID NO: 163;
(6αA1-c) a protein comprising an amino acid sequence encoded by a nucleotide sequence with deletion, substitution, insertion or addition of one or several nucleotides in SEQ ID NO: 162;
(6αA1-d) a protein comprising an amino acid sequence encoded by a nucleotide sequence having at least 70%, preferably at least 75%, at least 80%, at least 85%, at least 90%, at least 95%, at least 97%, at least 98%, or at least 99% identity to the nucleotide sequence of SEQ ID NO: 162;
(6αA1-e) a protein comprising an amino acid sequence encoded by a nucleic acid that hybridizes under stringent conditions with a nucleic acid having a nucleotide sequence complementary to the nucleotide sequence of SEQ ID NO: 162;
(6αB1) a protein comprising at least one amino acid sequence selected from the group consisting of SEQ ID NOs: 164-167, preferably a protein comprising at least 2, 3, or all sequences of the amino acid sequences. As referred to above, the amino acid sequence of any of SEQ ID NOs: 164 to 167 may be an amino acid sequence derived therefrom by deletion, substitution, insertion or addition of one or several amino acids;
(6αA2-a) a protein comprising an amino acid sequence with deletion, substitution, insertion or addition of one or several amino acids in SEQ ID NO: 169;
(6αA2-b) a protein comprising an amino acid sequence having at least 70%, preferably at least 75%, at least 80%, at least 85%, at least 90%, at least 95%, at least 97%, at least 98%, or at least 99% identity to the amino acid sequence of SEQ ID NO: 169;
(6αA2-c) a protein comprising an amino acid sequence encoded by a nucleotide sequence with deletion, substitution, insertion or addition of one or several nucleotides in SEQ ID NO: 168;
(6αA2-d) a protein comprising an amino acid sequence encoded by a nucleotide sequence having at least 70%, preferably at least 75%, at least 80%, at least 85%, at least 90%, at least 95%, at least 97%, at least 98%, or at least 99% identity to the nucleotide sequence of SEQ ID NO: 168;
(6αA2-e) a protein comprising an amino acid sequence encoded by a nucleic acid that hybridizes under stringent conditions with a nucleic acid having a nucleotide sequence complementary to the nucleotide sequence of SEQ ID NO: 168;
(6αB2) a protein comprising at least one amino acid sequence selected from the group consisting of SEQ ID NOs: 170-172, preferably a protein comprising at least 2, or all sequences of the amino acid sequences. As referred to above, the amino acid sequence of any of SEQ ID NOs: 170 to 172 may be an amino acid sequence derived therefrom by deletion, substitution, insertion or addition of one or several amino acids.

[0628] The protein selected from the group consisting of the proteins as defined above in (6αA1-a) to (6αA1-e), (6αB1), (6αA2-a) to (6αA2-e), and (6αB2) also include those proteins whose amino acid residues are modified by phosphorylation, sugar chain modification, aminoacylation, ring-opening, deamination or the like.

[0629] The protein selected from the group consisting of the proteins as defined above in (6αA1-a) to (6αA1-e), (6αB1), (6αA2-a) to (6αA2-e), and (6αB2) can be proteins that are found in a protein spot with a molecular weight of around 70 to 120 kDa, preferably around 80 to 110 kDa, and an isoelectric point of 3.5 to 7.5, preferably 4.0 to 7.0 on gels used in the two-dimensional electrophoresis performed under the conditions described above in the subsection titled “Identification of antigens”.

[0630] Preferably, a protein that is an antigen in spot 6α has activity equivalent to that of the protein having the amino acid sequence of SEQ ID NO: 163 or 169 (aconitate hydratase 1) or causative of an allergy to soybean.

[0631] (7α) Antigen in Spot 7α

[0632] As the result of sequence identification of the antigen in spot 7α by mass spectroscopy, the following amino acid sequences were detected.

(SEQ ID NO: 175)

AGITVIQIDEAALREGLPLRK

(SEQ ID NO: 176)

ALGVDTVPVLVGPVTYLLLSKPAK

(SEQ ID NO: 177)

DEAFFSGNAAALASRK

(SEQ ID NO: 178)

DEVEDLEK

(SEQ ID NO: 179)

ISEEEYVK

(SEQ ID NO: 180)

IVEVNALAK

(SEQ ID NO: 181)

LIRNELAK

(SEQ ID NO: 182)

LLSVFREGVK

(SEQ ID NO: 183)

LVVSTSSSLLHTAVDLVNETK

(SEQ ID NO: 184)

SFSLLSLLPK

(SEQ ID NO: 185)

SSPRVTNEAVQK

(SEQ ID NO: 186)

TLTSLNGVTAYGFDLVRGTNTLDLIK

(SEQ ID NO: 187)

YGAGIGPGVYDIHSPRIPPTEEIADRINK

[0633] Also, the mass spectroscopic data obtained for spot 7α on a mass spectrometer was analyzed by comparing the data against the NCBI protein data, and as a result, methionine synthase (amino acid sequence: SEQ ID NO: 174, encoding nucleotide sequence: SEQ ID NO: 173) was identified as a protein comprising any of SEQ ID NOs: 175 to 187.

[0634] Accordingly, the antigens in spot 7α in the present invention can be any protein selected from the group consisting of the proteins as defined below in (7αA-a) to (7αA-e) and (7αB):

(7αA-a) a protein comprising an amino acid sequence with deletion, substitution, insertion or addition of one or several amino acids in SEQ ID NO: 174;
(7αA-b) a protein comprising an amino acid sequence having at least 70%, preferably at least 75%, at least 80%, at least 85%, at least 90%, at least 95%, at least 97%, at least 98%, or at least 99% identity to the amino acid sequence of SEQ ID NO: 174;
(7αA-c) a protein comprising an amino acid sequence encoded by a nucleotide sequence with deletion, substitution, insertion or addition of one or several nucleotides in SEQ ID NO: 173;
(7αA-d) a protein comprising an amino acid sequence encoded by a nucleotide sequence having at least 70%, preferably at least 75%, at least 80%, at least 85%, at least 90%, at least 95%, at least 97%, at least 98%, or at least 99% identity to the nucleotide sequence of SEQ ID NO: 173:
(7αA-e) a protein comprising an amino acid sequence encoded by a nucleic acid that hybridizes under stringent conditions with a nucleic acid having a nucleotide sequence complementary to the nucleotide sequence of SEQ ID NO: 173;
(7αB) a protein comprising at least one amino acid sequence selected from the group consisting of SEQ ID NOs: 175-187, preferably a protein comprising at least 2, 3, 4, 5, 6, 7, 8, 9, 10, 11 or 12 or all sequences of the amino acid sequences. As referred to above, the amino acid sequence of any of SEQ ID NOs: 175-187 may be an amino acid sequence derived therefrom by deletion, substitution, insertion or addition of one or several amino acids.

[0635] The proteins selected from the group consisting of (7αA-a) to (7αA-e) and (7αB) as defined above also include those proteins whose amino acid residues are modified by phosphorylation, sugar chain modification, aminoacylation, ring-opening, deamination or the like.

[0636] The proteins selected from the group consisting of (7αA-a) to (7αA-e) and (7αB) as defined above can be proteins that are found in a protein spot with a molecular weight of around 50 to 120 kDa, preferably around 60 to 110 kDa and an isoelectric point of 3.5 to 7.5, preferably 4.0 to 7.0 on gels used in the two-dimensional electrophoresis performed under the conditions described above in the subsection titled “Identification of antigens”.

[0637] Preferably, a protein that is an antigen in spot 7α has activity equivalent to that of the protein having the amino acid sequence of SEQ ID NO: 174 (methionine synthase) or causative of an allergy to soybean.

[0638] (8α) Antigen in Spot 8α

[0639] As the result of sequence identification of the antigen in spot 8α by mass spectroscopy, the following amino acid sequences were detected.

(SEQ ID NO: 190)

AIGIDRFGASAPAGRIYK

(SEQ ID NO: 191)

ALPTYTPESPADATRNLSQTNLNALAK

(SEQ ID NO: 192)

ANSYSVHGSALGAK

(SEQ ID NO: 193)

ATADAALVEK

(SEQ ID NO: 194)

DKPTLIK

(SEQ ID NO: 195)

GGYTISDNSTGNKPDVILIGTGSELEIAAK

(SEQ ID NO: 196)

LPQLPGTSIEGVEK

(SEQ ID NO: 197)

NGNNGYDDIRAAIK

(SEQ ID NO: 198)

SVNTIRFLAIDAVEK

(SEQ ID NO: 199)

VTTTIGYGSPNK

[0640] Also, the mass spectroscopic data obtained for spot 8α on a mass spectrometer was analyzed by comparing the data against the NCBI protein data, and as a result, transketolase, chloroplastic (amino acid sequence: SEQ ID NO: 189, encoding nucleotide sequence: SEQ ID NO: 188) was identified as a protein comprising any of SEQ ID NOs: 190 to 199.

[0641] Accordingly, the antigens in spot 8α in the present invention can be any protein selected from the group consisting of the proteins as defined below in (8αA-a) to (8αA-e) and (8αB):

(8αA-a) a protein comprising an amino acid sequence with deletion, substitution, insertion or addition of one or several amino acids in SEQ ID NO: 189;
(8αA-b) a protein comprising an amino acid sequence having at least 70%, preferably at least 75%, at least 80%, at least 85%, at least 90%, at least 95%, at least 97%, at least 98%, or at least 99% identity to the amino acid sequence of SEQ ID NO: 189;
(8αA-c) a protein comprising an amino acid sequence encoded by a nucleotide sequence with deletion, substitution, insertion or addition of one or several nucleotides in SEQ ID NO: 188;
(8αA-d) a protein comprising an amino acid sequence encoded by a nucleotide sequence having at least 70%, preferably at least 75%, at least 80%, at least 85%, at least 90%, at least 95%, at least 97%, at least 98%, or at least 99% identity to the nucleotide sequence of SEQ ID NO: 188;
(8αA-e) a protein comprising an amino acid sequence encoded by a nucleic acid that hybridizes under stringent conditions with a nucleic acid having a nucleotide sequence complementary to the nucleotide sequence of SEQ 1D NO: 188;
(8αB) a protein comprising at least one amino acid sequence selected from the group consisting of SEQ ID NOs: 190-199, preferably a protein comprising at least 2, 3, 4, 5, 6, 7, 8 or 9 or all sequences of the amino acid sequences. As referred to above, the amino acid sequence of any of SEQ ID NOs: 190-199 may be an amino acid sequence derived therefrom by deletion, substitution, insertion or addition of one or several amino acids.

[0642] The proteins selected from the group consisting of (8αA-a) to (8αA-e) and (8αB) as defined above also include those proteins whose amino acid residues are modified by phosphorylation, sugar chain modification, aminoacylation, ring-opening, deamination or the like.

[0643] The proteins selected from the group consisting of (8αA-a) to (8αA-e) and (8αB) as defined above can be proteins that are found in a protein spot with a molecular weight of around 50 to 120 kDa, preferably around 60 to 110 kDa and an isoelectric point of 3.5 to 8.5, preferably 4.0 to 8.0 on gels used in the two-dimensional electrophoresis performed under the conditions described above in the subsection titled “Identification of antigens”.

[0644] Preferably, a protein that is an antigen in spot 8α has activity equivalent to that of the protein having the amino acid sequence of SEQ ID NO: 189 (transketolase, chloroplastic) or causative of an allergy to soybean.

[0645] (9α) Antigen in Spot 9α

[0646] As the result of sequence identification of the antigen in spot 9α by mass spectroscopy, the following amino acid sequences were detected.

(SEQ ID NO: 202)

DLSSEEANQYLK

[0647] Also, the mass spectroscopic data obtained for spot 9α on a mass spectrometer was analyzed by comparing the data against the NCBI protein data, and as a result, lysine-tRNA ligase, cytoplasmic-like isoform X2 (amino acid sequence: SEQ ID NO: 201, encoding nucleotide sequence: SEQ ID NO: 200) was identified as a protein comprising SEQ ID NO: 202.

[0648] Accordingly, the antigens in spot 9α in the present invention can be any protein selected from the group consisting of the proteins as defined below in (9αA-a) to (9αA-e) and (9αB):

(9αA-a) a protein comprising an amino acid sequence with deletion, substitution, insertion or addition of one or several amino acids in SEQ 1D NO: 201;
(9αA-b) a protein comprising an amino acid sequence having at least 70%, preferably at least 75%, at least 80%, at least 85%, at least 90%, at least 95%, at least 97%, at least 98%, or at least 99% identity to the amino acid sequence of SEQ ID NO: 201;
(9αA-c) a protein comprising an amino acid sequence encoded by a nucleotide sequence with deletion, substitution, insertion or addition of one or several nucleotides in SEQ ID NO: 200;
(9αA2-d) a protein comprising an amino acid sequence encoded by a nucleotide sequence having at least 70%, preferably at least 75%, at least 80%, at least 85%, at least 90%, at least 95%, at least 97%, at least 98%, or at least 99% identity to the nucleotide sequence of SEQ ID NO: 200;
(9αA-e) a protein comprising an amino acid sequence encoded by a nucleic acid that hybridizes under stringent conditions with a nucleic acid having a nucleotide sequence complementary to the nucleotide sequence of SEQ ID NO: 200;
(9αB) a protein comprising an amino acid sequence of SEQ ID NO: 202. As referred to above, the amino acid sequence(s) of SEQ ID NO: 202 may be an amino acid sequence(s) derived therefrom by deletion, substitution, insertion or addition of one or several amino acids.

[0649] The proteins selected from the group consisting of (9αA-a) to (9αA-e) and (9αB) as defined above also include those proteins whose amino acid residues are modified by phosphorylation, sugar chain modification, aminoacylation, ring-opening, deamination or the like.

[0650] The proteins selected from the group consisting of (9αA-a) to (9αA-e) and (9αB) as defined above can be proteins that are found in a protein spot with a molecular weight of around 50 to 120 kDa, preferably around 60 to 110 kDa and an isoelectric point of 3.5 to 8.5, preferably 4.0 to 8.0 on gels used in the two-dimensional electrophoresis performed under the conditions described above in the subsection titled “Identification of antigens”.

[0651] Preferably, a protein that is an antigen in spot 9α has activity equivalent to that of the protein having the amino acid sequence of SEQ ID NO: 201 (lysine-tRNA ligase, cytoplasmic-like isoform X2) or causative of an allergy to soybean.

[0652] (10α) Antigen in Spot 10α

[0653] As the result of sequence identification of the antigen in spot 10α by mass spectroscopy, the following amino acid sequences were detected.

(SEQ ID NO: 205)

AAVEEGIVPGGGVALLYASSELDK

(SEQ ID NO: 206)

DRVTDALNATK

(SEQ ID NO: 207)

EGVITISDGK

(SEQ ID NO: 208)

GRNVVIEQSFGAPK

(SEQ ID NO: 209)

GVEELADAVK

(SEQ ID NO: 210)

IGGASEAEVGEK

(SEQ ID NO: 211)

IGVQIIQNALK

(SEQ ID NO: 212)

ISSINAIVK

(SEQ ID NO: 213)

LLEQNDPDLGYDAAK

(SEQ ID NO: 214)

LQTANFDQK

(SEQ ID NO: 215)

LSGGVAVLK

(SEQ ID NO: 216)

NIGASLVK

(SEQ ID NO: 217)

TGIIDPLK

(SEQ ID NO: 218)

TPVHTIASNAGVEGAVVVGK

(SEQ ID NO: 221)

AGIIDPLK

(SEQ ID NO: 222)

DRVTDALNATK

(SEQ ID NO: 223)

EGVITISDGK

(SEQ ID NO: 224)

GRNVVIEQSFGAPK

(SEQ ID NO: 225)

GVEELADAVK

(SEQ ID NO: 226)

IGGASEAEVGEK

(SEQ ID NO: 227)

IGVQIIQNALK

(SEQ ID NO: 228)

ISSINAIVK

(SEQ ID NO: 229)

LLEQENHDLGYDAAK

(SEQ ID NO: 230)

LQTANFDQK

(SEQ ID NO: 231)

LSGGVAVLK

[0654] Also, the mass spectroscopic data obtained for spot 10α on a mass spectrometer was analyzed by comparing the data against the NCBI protein data, and as a result, chaperonin CPN60-2, mitochondrial (amino acid sequence: SEQ ID NO: 204, encoding nucleotide sequence: SEQ ID NO: 203) was identified as a protein comprising any of SEQ ID NOs: 205 to 218 and chaperonin CPN60-2, mitochondrial-like isoform X1 (amino acid sequence: SEQ ID NO: 220, encoding nucleotide sequence: SEQ ID NO: 219) was identified as a protein comprising any of SEQ ID NOs: 221 to 231.

[0655] Accordingly, the antigen in spot 10α in the present invention can be any of proteins selected from the group consisting of the proteins as defined below in (10αA1-a) to (10αA1-e), (10αB1), (10αA2-a) to (10αA2-e), and (10αB2):

(10αA1-a) a protein comprising an amino acid sequence with deletion, substitution, insertion or addition of one or several amino acids in SEQ ID NO: 204;
(10αA1-b) a protein comprising an amino acid sequence having at least 70%, preferably at least 75%, at least 80%, at least 85%, at least 90%, at least 95%, at least 97%, at least 98%, or at least 99% identity to the amino acid sequence of SEQ ID NO: 204;
(10αA1-c) a protein comprising an amino acid sequence encoded by a nucleotide sequence with deletion, substitution, insertion or addition of one or several nucleotides in SEQ ID NO: 203;
(10αA1-d) a protein comprising an amino acid sequence encoded by a nucleotide sequence having at least 70%, preferably at least 75%, at least 80%, at least 85%, at least 90%, at least 95%, at least 97%, at least 98%, or at least 99% identity to the nucleotide sequence of SEQ ID NO: 203;
(10αA1-e) a protein comprising an amino acid sequence encoded by a nucleic acid that hybridizes under stringent conditions with a nucleic acid having a nucleotide sequence complementary to the nucleotide sequence of SEQ ID NO: 203;
(10αB1) a protein comprising at least one amino acid sequence selected from the group consisting of SEQ ID NOs: 205-218, preferably a protein comprising at least 2, 3, 4, 5, 6, 7, 8, 9, 10, 11, 12, or 13 or all sequences of the amino acid sequences. As referred to above, the amino acid sequence of any of SEQ ID NOs: 205 to 218 may be an amino acid sequence derived therefrom by deletion, substitution, insertion or addition of one or several amino acids;
(10αA2-a) a protein comprising an amino acid sequence with deletion, substitution, insertion or addition of one or several amino acids in SEQ ID NO: 220;
(10αA2-b) a protein comprising an amino acid sequence having at least 70%, preferably at least 75%, at least 80%, at least 85%, at least 90%, at least 95%, at least 97%, at least 98%, or at least 99% identity to the amino acid sequence of SEQ ID NO: 220;
(10αA2-c) a protein comprising an amino acid sequence encoded by a nucleotide sequence with deletion, substitution, insertion or addition of one or several nucleotides in SEQ ID NO: 219;
(10αA2-d) a protein comprising an amino acid sequence encoded by a nucleotide sequence having at least 70%, preferably at least 75%, at least 80%, at least 85%, at least 90%, at least 95%, at least 97%, at least 98%, or at least 99% identity to the nucleotide sequence of SEQ ID NO: 219;
(10αA2-e) a protein comprising an amino acid sequence encoded by a nucleic acid that hybridizes under stringent conditions with a nucleic acid having a nucleotide sequence complementary to the nucleotide sequence of SEQ ID NO: 219;
(10αB2) a protein comprising at least one amino acid sequence selected from the group consisting of SEQ ID NOs: 221-231, preferably a protein comprising at least 2, 3, 4, 5, 6, 7, 8, 9, or 10, or all sequences of the amino acid sequences. As referred to above, the amino acid sequence of any of SEQ ID NOs: 221 to 231 may be an amino acid sequence derived therefrom by deletion, substitution, insertion or addition of one or several amino acids.

[0656] The protein selected from the group consisting of the proteins as defined above in (10αA1-a) to (10αA1-e), (10αB1), (10αA2-a) to (10αA2-e), and (10αB2) also include those proteins whose amino acid residues are modified by phosphorylation, sugar chain modification, aminoacylation, ring-opening, deamination or the like.

[0657] The protein selected from the group consisting of the proteins as defined above in (10αA1-a) to (10αA1-e), (10αB1), (10αA2-a) to (10αA2-e), and (10αB2) can be proteins that are found in a protein spot with a molecular weight of around 30 to 90 kDa, preferably around 40 to 80 kDa, and an isoelectric point of 3.5 to 7.5, preferably 4.0 to 7.0 on gels used in the two-dimensional electrophoresis performed under the conditions described above in the subsection titled “Identification of antigens”.

[0658] Preferably, a protein that is an antigen in spot 10α has activity equivalent to that of the protein having the amino acid sequence of SEQ ID NO: 204 (haperonin CPN60-2, mitochondrial) or the protein having the amino acid sequence of SEQ ID NO: 220 (chaperonin CPN60-2, mitochondrial-like isoform X1) or causative of an allergy to soybean.

[0659] (11α) Antigen in Spot 11α

[0660] As the result of sequence identification of the antigen in spot 11α by mass spectroscopy, the following amino acid sequences were detected.

(SEQ ID NO: 234)

AIDVLNFTPLNGK

(SEQ ID NO: 235)

FNNVFVK

(SEQ ID NO: 236)

GFGFVNFANVDDAAK

(SEQ ID NO: 237)

SGAANVFIK

[0661] Also, the mass spectroscopic data obtained for spot 11α on a mass spectrometer was analyzed by comparing the data against the NCBI protein data, and as a result, polyadenylate-binding protein 8 isoform X3 (amino acid sequence: SEQ ID NO: 233, encoding nucleotide sequence: SEQ ID NO: 232) was identified as a protein comprising any of SEQ ID NOs: 234 to 237.

[0662] Accordingly, the antigens in spot 11α in the present invention can be any protein selected from the group consisting of the proteins as defined below in (11αA-a) to (11αA-e) and (11αB):

(11αA-a) a protein comprising an amino acid sequence with deletion, substitution, insertion or addition of one or several amino acids in SEQ ID NO: 233;
(11αA-b) a protein comprising an amino acid sequence having at least 70%, preferably at least 75%, at least 80%, at least 85%, at least 90%, at least 95%, at least 97%, at least 98%, or at least 99% identity to the amino acid sequence of SEQ ID NO: 233;
(11αA-c) a protein comprising an amino acid sequence encoded by a nucleotide sequence with deletion, substitution, insertion or addition of one or several nucleotides in SEQ ID NO: 232;
(11αA-d) a protein comprising an amino acid sequence encoded by a nucleotide sequence having at least 70%, preferably at least 75%, at least 80%, at least 85%, at least 90%, at least 95%, at least 97%, at least 98%, or at least 99% identity to the nucleotide sequence of SEQ ID NO: 232:
(11αA-e) a protein comprising an amino acid sequence encoded by a nucleic acid that hybridizes under stringent conditions with a nucleic acid having a nucleotide sequence complementary to the nucleotide sequence of SEQ ID NO: 232;
(11αB) a protein comprising at least one amino acid sequence selected from the group consisting of SEQ ID NOs: 234-237, preferably a protein comprising at least 2 or 3 or all sequences of the amino acid sequences. As referred to above, the amino acid sequence of any of SEQ ID NOs: 234-237 may be an amino acid sequence derived therefrom by deletion, substitution, insertion or addition of one or several amino acids.

[0663] The proteins selected from the group consisting of (11αA-a) to (11αA-e) and (11αB) as defined above also include those proteins whose amino acid residues are modified by phosphorylation, sugar chain modification, aminoacylation, ring-opening, deamination or the like.

[0664] The proteins selected from the group consisting of (11αA-a) to (11αA-e) and (11αB) as defined above can be proteins that are found in a protein spot with a molecular weight of around 30 to 90 kDa, preferably around 40 to 80 kDa and an isoelectric point of 3.5 to 8.5, preferably 4.0 to 8.0 on gels used in the two-dimensional electrophoresis performed under the conditions described above in the subsection titled “Identification of antigens”.

[0665] Preferably, a protein that is an antigen in spot 11α has activity equivalent to that of the protein having the amino acid sequence of SEQ ID NO: 233 (polyadenylate-binding protein 8 isoform X3) or causative of an allergy to soybean.

[0666] (12α) Antigen in Spot 12α

[0667] As the result of sequence identification of the antigen in spot 12α by mass spectroscopy, the following amino acid sequences were detected.

(SEQ ID NO: 240)

VVGVPVTLNGDLK

[0668] Also, the mass spectroscopic data obtained for spot 12α on a mass spectrometer was analyzed by comparing the data against the NCBI protein data, and as a result, pyrophosphate-fructose 6-phosphate 1-phosphotransferase subunit alpha-like (amino acid sequence: SEQ ID NO: 239, encoding nucleotide sequence: SEQ ID NO: 238) was identified as a protein comprising SEQ ID NO: 240.

[0669] Accordingly, the antigens in spot 12α in the present invention can be any protein selected from the group consisting of the proteins as defined below in (12αA-a) to (12αA-e) and (12αB):

(12αA-a) a protein comprising an amino acid sequence with deletion, substitution, insertion or addition of one or several amino acids in SEQ ID NO: 239;
(12αA-b) a protein comprising an amino acid sequence having at least 70%, preferably at least 75%, at least 80%, at least 85%, at least 90%, at least 95%, at least 97%, at least 98%, or at least 99% identity to the amino acid sequence of SEQ ID NO: 239;
(12αA-c) a protein comprising an amino acid sequence encoded by a nucleotide sequence with deletion, substitution, insertion or addition of one or several nucleotides in SEQ ID NO: 238;
(12αA-d) a protein comprising an amino acid sequence encoded by a nucleotide sequence having at least 70%, preferably at least 75%, at least 80%, at least 85%, at least 90%, at least 95%, at least 97%, at least 98%, or at least 99% identity to the nucleotide sequence of SEQ ID NO: 238;
(12αA-e) a protein comprising an amino acid sequence encoded by a nucleic acid that hybridizes under stringent conditions with a nucleic acid having a nucleotide sequence complementary to the nucleotide sequence of SEQ ID NO: 238;
(12αB) a protein comprising an amino acid sequence of SEQ ID NO: 240. As referred to above, the amino acid sequence(s) of SEQ ID NO: 240 may be an amino acid sequence(s) derived therefrom by deletion, substitution, insertion or addition of one or several amino acids.

[0670] The proteins selected from the group consisting of (12αA-a) to (12αA-e) and (12αB) as defined above also include those proteins whose amino acid residues are modified by phosphorylation, sugar chain modification, aminoacylation, ring-opening, deamination or the like.

[0671] The proteins selected from the group consisting of (12αA-a) to (12αA-e) and (12αB) as defined above can be proteins that are found in a protein spot with a molecular weight of around 30 to 90 kDa, preferably around 40 to 80 kDa and an isoelectric point of 3.5 to 8.5, preferably 4.0 to 8.0 on gels used in the two-dimensional electrophoresis performed under the conditions described above in the subsection titled “Identification of antigens”.

[0672] Preferably, a protein that is an antigen in spot 12α has activity equivalent to that of the protein having the amino acid sequence of SEQ ID NO: 239 (pyrophosphate-fructose 6-phosphate 1-phosphotransferase subunit alpha-like) or causative of an allergy to soybean.

[0673] (13α) Antigen in Spot 13α

[0674] As the result of sequence identification of the antigen in spot 13α by mass spectroscopy, the following amino acid sequences were detected.

(SEQ ID NO: 243)

AASILSSHDPPVVLAK

(SEQ ID NO: 244)

DGNVAPFVK

(SEQ ID NO: 245)

DLASQYDVRGYPTIK

(SEQ ID NO: 246)

EDIIEFIEK

(SEQ ID NO: 247)

EEQVPLIIIQHNDGK

(SEQ ID NO: 248)

EFVLTLDHSNFHDTVSK

(SEQ ID NO: 249)

FFKPNLEADHIPTWLK

(SEQ ID NO: 250)

FFNSPNAK

(SEQ ID NO: 251)

FSGEEFDNFSALAEK

(SEQ ID NO: 252)

FVEESSTPVVTVFNNDPSNHPFVAK

(SEQ ID NO: 255)

AASILSSHDPPIVLAK

(SEQ ID NO: 256)

DGHVAPFVK

(SEQ ID NO: 257)

DLASQYDVK

(SEQ ID NO: 258)

EDIIEFIEK

(SEQ ID NO: 259)

EEQVPLIIIQHNDGK

(SEQ ID NO: 260)

EFVLTLDHSNFHDTVSK

(SEQ ID NO: 261)

FFKPNLEADHIPTWLK

(SEQ ID NO: 262)

FFNSPNAK

(SEQ ID NO: 263)

FSGEEFDNFSALAEK

(SEQ ID NO: 264)

FVEESSTPVVTVFNNEPSNHPFVVK

(SEQ ID NO: 265)

GFPTINILRNGGK

(SEQ ID NO: 266)

GPREADGIVDYLK

(SEQ ID NO: 267)

LAPEYEK

(SEQ ID NO: 268)

LDATANDIPSETFDVQGYPTVYFRSASGK

(SEQ ID NO: 269)

LRSDYDFGHTLNAK

(SEQ ID NO: 270)

LSQYDGGRTK

(SEQ ID NO: 271)

QLAPILDEVAISYQNEADVVIAK

(SEQ ID NO: 272)

QQGVSFLVGDVESSQGAFQYFGLK

(SEQ ID NO: 273)

QSGPASTEIK

(SEQ ID NO: 274)

SADEATAFIGENK

(SEQ ID NO: 275)

SEPIPETNDEPVK

(SEQ ID NO: 276)

VAIVGVFPK

(SEQ ID NO: 277)

VVVGASLEDIVFK

(SEQ ID NO: 278)

YREAAEQYK

[0675] Also, the mass spectroscopic data obtained for spot 13α on a mass spectrometer was analyzed by comparing the data against the NCBI protein data, and as a result, protein disulfide isomerase-like protein precursor (amino acid sequence: SEQ ID NO: 242, encoding nucleotide sequence: SEQ ID NO: 241) was identified as a protein comprising any of SEQ ID NOs: 243 to 252 and protein disulfide-isomerase (amino acid sequence: SEQ ID NO: 254, encoding nucleotide sequence: SEQ ID NO: 253) was identified as a protein comprising any of SEQ ID NOs: 255 to 278.

[0676] Accordingly, the antigen in spot 13α in the present invention can be any of proteins selected from the group consisting of the proteins as defined below in (13αA1-a) to (13αA1-e), (13αB1), (13αA2-a) to (13αA2-e), and (13αB2):

(13αA1-a) a protein comprising an amino acid sequence with deletion, substitution, insertion or addition of one or several amino acids in SEQ ID NO: 242;
(13αA1-b) a protein comprising an amino acid sequence having at least 70%, preferably at least 75%, at least 80%, at least 85%, at least 90%, at least 95%, at least 97%, at least 98%, or at least 99% identity to the amino acid sequence of SEQ ID NO: 242;
(13αA1-c) a protein comprising an amino acid sequence encoded by a nucleotide sequence with deletion, substitution, insertion or addition of one or several nucleotides in SEQ ID NO: 241;
(13αA1-d) a protein comprising an amino acid sequence encoded by a nucleotide sequence having at least 70%, preferably at least 75%, at least 80%, at least 85%, at least 90%, at least 95%, at least 97%, at least 98%, or at least 99% identity to the nucleotide sequence of SEQ ID NO: 241;
(13αA1-e) a protein comprising an amino acid sequence encoded by a nucleic acid that hybridizes under stringent conditions with a nucleic acid having a nucleotide sequence complementary to the nucleotide sequence of SEQ ID NO: 241;
(13αB1) a protein comprising at least one amino acid sequence selected from the group consisting of SEQ ID NOs: 243-252, preferably a protein comprising at least 2, 3, 4, 5, 6, 7, 8, or 9, or all sequences of the amino acid sequences. As referred to above, the amino acid sequence of any of SEQ ID NOs: 205 to 218 may be an amino acid sequence derived therefrom by deletion, substitution, insertion or addition of one or several amino acids;
(13αA2-a) a protein comprising an amino acid sequence with deletion, substitution, insertion or addition of one or several amino acids in SEQ ID NO: 254;
(13αA2-b) a protein comprising an amino acid sequence having at least 70%, preferably at least 75%, at least 80%, at least 85%, at least 90%, at least 95%, at least 97%, at least 98%, or at least 99% identity to the amino acid sequence of SEQ ID NO: 254;
(13αA2-c) a protein comprising an amino acid sequence encoded by a nucleotide sequence with deletion, substitution, insertion or addition of one or several nucleotides in SEQ ID NO: 253;
(13αA2-d) a protein comprising an amino acid sequence encoded by a nucleotide sequence having at least 70%, preferably at least 75%, at least 80%, at least 85%, at least 90%, at least 95%, at least 97%, at least 98%, or at least 99% identity to the nucleotide sequence of SEQ ID NO: 253;
(13αA2-e) a protein comprising an amino acid sequence encoded by a nucleic acid that hybridizes under stringent conditions with a nucleic acid having a nucleotide sequence complementary to the nucleotide sequence of SEQ ID NO: 253;
(13αB2) a protein comprising at least one amino acid sequence selected from the group consisting of SEQ ID NOs: 255-278, preferably a protein comprising at least 2, 3, 4, 5, 6, 7, 8, 9, 10, 11, 12, 13, 14, 15, 16, 17, 18, 19, 20, 21, 22, or 23, or all sequences of the amino acid sequences. As referred to above, the amino acid sequence of any of SEQ ID NOs: 221 to 231 may be an amino acid sequence derived therefrom by deletion, substitution, insertion or addition of one or several amino acids.

[0677] The protein selected from the group consisting of the proteins as defined above in (13αA1-a) to (13αA1-e), (13αB1), (13αA2-a) to (13αA2-e), and (13αB2) also include those proteins whose amino acid residues are modified by phosphorylation, sugar chain modification, aminoacylation, ring-opening, deamination or the like.

[0678] The protein selected from the group consisting of the proteins as defined above in (13αA1-a) to (13αA1-e), (13αB1), (13αA2-a) to (13αA2-e), and (13αB2) can be proteins that are found in a protein spot with a molecular weight of around 30 to 90 kDa, preferably around 40 to 80 kDa, and an isoelectric point of 3.5 to 7.5, preferably 4.0 to 7.0 on gels used in the two-dimensional electrophoresis performed under the conditions described above in the subsection titled “Identification of antigens”.

[0679] Preferably, a protein that is an antigen in spot 13α has activity equivalent to that of the protein having the amino acid sequence of SEQ ID NO: 242 (protein disulfide isomerase-like protein precursor) or the protein having the amino acid sequence of SEQ ID NO: 254 (protein disulfide-isomerase) or causative of an allergy to soybean.

[0680] (14α) Antigen in Spot 14α

[0681] As the result of sequence identification of the antigen in spot 14α by mass spectroscopy, the following amino acid sequences were detected.

(SEQ ID NO: 281)

DHSDVSNQLYANYAIGK

(SEQ ID NO: 282)

FQEIVNIRLGDGTTRRGQVLEVDGEK

(SEQ ID NO: 283)

FTTVQFTGEVLK

(SEQ ID NO: 284)

TLDQFYSRDASN

(SEQ ID NO: 287)

FQEIVNIRLGDGTTRRGQVLEVDGEK

(SEQ ID NO: 288)

FTTVQFTGEVLK

(SEQ ID NO: 289)

TLDQFYSRDAGN

[0682] Also, the mass spectroscopic data obtained for spot 14α on a mass spectrometer was analyzed by comparing the data against the NCBI protein data, and as a result, V-type proton ATPase subunit B2 (amino acid sequence: SEQ ID NO: 280, encoding nucleotide sequence: SEQ ID NO: 279) was identified as a protein comprising any of SEQ ID NOs: 281 to 284 and V-type proton ATPase subunit B2 (amino acid sequence: SEQ ID NO: 286, encoding nucleotide sequence: SEQ ID NO: 285) was identified as a protein comprising any of SEQ ID NOs: 287 to 289.

[0683] Accordingly, the antigen in spot 14α in the present invention can be any of proteins selected from the group consisting of the proteins as defined below in (14αA1-a) to (14αA1-e), (14αB1), (14αA2-a) to (14αA2-e), and (14αB2):

(14αA1-a) a protein comprising an amino acid sequence with deletion, substitution, insertion or addition of one or several amino acids in SEQ ID NO: 280;
(14αA1-b) a protein comprising an amino acid sequence having at least 70%, preferably at least 75%, at least 80%, at least 85%, at least 90%, at least 95%, at least 97%, at least 98%, or at least 99% identity to the amino acid sequence of SEQ ID NO: 280;
(14αA1-c) a protein comprising an amino acid sequence encoded by a nucleotide sequence with deletion, substitution, insertion or addition of one or several nucleotides in SEQ ID NO: 279;
(14αA1-d) a protein comprising an amino acid sequence encoded by a nucleotide sequence having at least 70%, preferably at least 75%, at least 80%, at least 85%, at least 90%, at least 95%, at least 97%, at least 98%, or at least 99% identity to the nucleotide sequence of SEQ ID NO: 279;
(14αA1-e) a protein comprising an amino acid sequence encoded by a nucleic acid that hybridizes under stringent conditions with a nucleic acid having a nucleotide sequence complementary to the nucleotide sequence of SEQ ID NO: 279;
(14αB1) a protein comprising at least one amino acid sequence selected from the group consisting of SEQ ID NOs: 281-284, preferably a protein comprising at least 2, 3, or all sequences of the amino acid sequences. As referred to above, the amino acid sequence of any of SEQ ID NOs: 281 to 284 may be an amino acid sequence derived therefrom by deletion, substitution, insertion or addition of one or several amino acids;
(14αA2-a) a protein comprising an amino acid sequence with deletion, substitution, insertion or addition of one or several amino acids in SEQ ID NO: 286;
(14αA2-b) a protein comprising an amino acid sequence having at least 70%, preferably at least 75%, at least 80%, at least 85%, at least 90%, at least 95%, at least 97%, at least 98%, or at least 99% identity to the amino acid sequence of SEQ ID NO: 286;
(14αA2-c) a protein comprising an amino acid sequence encoded by a nucleotide sequence with deletion, substitution, insertion or addition of one or several nucleotides in SEQ ID NO: 285;
(14αA2-d) a protein comprising an amino acid sequence encoded by a nucleotide sequence having at least 70%, preferably at least 75%, at least 80%, at least 85%, at least 90%, at least 95%, at least 97%, at least 98%, or at least 99% identity to the nucleotide sequence of SEQ ID NO: 285;
(14αA2-e) a protein comprising an amino acid sequence encoded by a nucleic acid that hybridizes under stringent conditions with a nucleic acid having a nucleotide sequence complementary to the nucleotide sequence of SEQ ID NO: 285;
(14αB2) a protein comprising at least one amino acid sequence selected from the group consisting of SEQ ID NOs: 287-289, preferably a protein comprising at least 2, or all sequences of the amino acid sequences. As referred to above, the amino acid sequence of any of SEQ ID NOs: 287 to 289 may be an amino acid sequence derived therefrom by deletion, substitution, insertion or addition of one or several amino acids.

[0684] The protein selected from the group consisting of the proteins as defined above in (14αA1-a) to (14αA1-e), (14αB1), (14αA2-a) to (14αA2-e), and (14αB2) also include those proteins whose amino acid residues are modified by phosphorylation, sugar chain modification, aminoacylation, ring-opening, deamination or the like.

[0685] The protein selected from the group consisting of the proteins as defined above in (14αA1-a) to (14αA1-e), (14αB1), (14αA2-a) to (14αA2-e), and (14αB2) can be proteins that are found in a protein spot with a molecular weight of around 30 to 90 kDa, preferably around 40 to 80 kDa, and an isoelectric point of 2.5 to 6.5, preferably 3.0 to 6.0 on gels used in the two-dimensional electrophoresis performed under the conditions described above in the subsection titled “Identification of antigens”.

[0686] Preferably, a protein that is an antigen in spot 14α has activity equivalent to that of the protein having the amino acid sequence of SEQ ID NO: 280 or 286 (V-type proton ATPase subunit B2) or causative of an allergy to soybean.

[0687] (15α, 16α) Antigens in Spots 15α, 16α

[0688] As the result of sequence identification of the antigens in spots 15α and 16α by mass spectroscopy, the following amino acid sequences were detected.

(SEQ ID NO: 292)

AIGINVPRSRFLPVK

(SEQ ID NO: 293)

ARENPENPSIELGPEFK

(SEQ ID NO: 294)

ATSDLLLVQSDLYTLEDGFVIRNK

(SEQ ID NO: 295)

EINGPEDL

(SEQ ID NO: 296)

EYVFVANSDNLGAIVDLK

(SEQ ID NO: 297)

ILNHLIQNK

(SEQ ID NO: 298)

IQTPTDEVVVPYDTLAPTPEGSSEVK

(SEQ ID NO: 299)

LDALLSQGK

(SEQ ID NO: 300)

RLVEADALK

(SEQ ID NO: 301)

SAVAGLNEISENEK

(SEQ ID NO: 302)

SIPSIVELDSLK

(SEQ ID NO: 303)

VLQLETAAGAAIRFFDK

(SEQ ID NO: 304)

VSNFLGRFK

(SEQ ID NO: 307)

AIGINVPRSRFLPVK

(SEQ ID NO: 308)

ATSDLLLVQSDLYTLEDGFVIRNK

(SEQ ID NO: 309)

EYVFVANSDNLGAIVDLK

(SEQ ID NO: 310)

ILNHLIQNK

(SEQ ID NO: 311)

IQTPTDEVVVPYDTLAPTPDGSSDVK

(SEQ ID NO: 312)

LDALLSQGK

(SEQ ID NO: 313)

LEVPDGAVISDK

(SEQ ID NO: 314)

RLVEADALK

(SEQ ID NO: 315)

SAVAGLNEISESEK

(SEQ ID NO: 316)

SIPSIVELDSLK

(SEQ ID NO: 317)

VLQLETAAGAAIRFFDK

(SEQ ID NO: 318)

VSNFLGRFK

[0689] Also, the mass spectroscopic data obtained for spots 15α, 16α on a mass spectrometer was analyzed by comparing the data against the NCBI protein data, and as a result, UTP-glucose-1-phosphate uridylyltransferase (amino acid sequence: SEQ ID NO: 291, encoding nucleotide sequence: SEQ ID NO: 290) was identified as a protein comprising any of SEQ ID NOs: 292 to 304 and the hypothetical protein GLYMA_02G241100 (amino acid sequence: SEQ ID NO: 306, encoding nucleotide sequence: SEQ ID NO: 305) was identified as a protein comprising any of SEQ ID NOs: 307 to 318.

[0690] Accordingly, the antigen in spot 15α, 16α in the present invention can be any of proteins selected from the group consisting of the proteins as defined below in (15, 16αA1-a) to (15, 16αA1-e), (15, 16αB1), (15, 16αA2-a) to (15, 16αA2-e), and (15, 16αB2):

(15, 16αA1-a) a protein comprising an amino acid sequence with deletion, substitution, insertion or addition of one or several amino acids in SEQ ID NO: 291;
(15, 16αA1-b) a protein comprising an amino acid sequence having at least 70%, preferably at least 75%, at least 80%, at least 85%, at least 90%, at least 95%, at least 97%, at least 98%, or at least 99% identity to the amino acid sequence of SEQ ID NO: 291;
(15, 16αA1-c) a protein comprising an amino acid sequence encoded by a nucleotide sequence with deletion, substitution, insertion or addition of one or several nucleotides in SEQ ID NO: 290;
(15, 16αA1-d) a protein comprising an amino acid sequence encoded by a nucleotide sequence having at least 70%, preferably at least 75%, at least 80%, at least 85%, at least 90%, at least 95%, at least 97%, at least 98%, or at least 99% identity to the nucleotide sequence of SEQ ID NO: 290;
(15, 16α A1-e) a protein comprising an amino acid sequence encoded by a nucleic acid that hybridizes under stringent conditions with a nucleic acid having a nucleotide sequence complementary to the nucleotide sequence of SEQ ID NO: 290;
(15, 16αB1) a protein comprising at least one amino acid sequence selected from the group consisting of SEQ ID NOs: 292-304, preferably a protein comprising at least 2, 3, 4, 5, 6, 7, 8, 9, 10, 11, or 12 or all sequences of the amino acid sequences. As referred to above, the amino acid sequence of any of SEQ ID NOs: 292 to 304 may be an amino acid sequence derived therefrom by deletion, substitution, insertion or addition of one or several amino acids;
(15, 16αA2-a) a protein comprising an amino acid sequence with deletion, substitution, insertion or addition of one or several amino acids in SEQ ID NO: 306;
(15, 16αA2-b) a protein comprising an amino acid sequence having at least 70%, preferably at least 75%, at least 80%, at least 85%, at least 90%, at least 95%, at least 97%, at least 98%, or at least 99% identity to the amino acid sequence of SEQ ID NO: 306;
(15, 16αA2-c) a protein comprising an amino acid sequence encoded by a nucleotide sequence with deletion, substitution, insertion or addition of one or several nucleotides in SEQ ID NO: 305;
(15, 16αA2-d) a protein comprising an amino acid sequence encoded by a nucleotide sequence having at least 70%, preferably at least 75%, at least 80%, at least 85%, at least 90%, at least 95%, at least 97%, at least 98%, or at least 99% identity to the nucleotide sequence of SEQ ID NO: 305;
(15, 16αA2-e) a protein comprising an amino acid sequence encoded by a nucleic acid that hybridizes under stringent conditions with a nucleic acid having a nucleotide sequence complementary to the nucleotide sequence of SEQ ID NO: 305;
(15, 16αB2) a protein comprising at least one amino acid sequence selected from the group consisting of SEQ ID NOs: 307-318, preferably a protein comprising at least 2, 3, 4, 5, 6, 7, 8, 9, 10, or 11 or all sequences of the amino acid sequences. As referred to above, the amino acid sequence of any of SEQ ID NOs: 307 to 318 may be an amino acid sequence derived therefrom by deletion, substitution, insertion or addition of one or several amino acids.

[0691] The protein selected from the group consisting of the proteins as defined above in (15, 16αA1-a) to (15, 16αA1-e), (15, 16αB1), (15, 16αA2-a) to (15, 16αA2-e), and (15, 16αB2) also include those proteins whose amino acid residues are modified by phosphorylation, sugar chain modification, aminoacylation, ring-opening, deamination or the like.

[0692] The protein selected from the group consisting of the proteins as defined above in (15, 16αA1-a) to (15, 16αA1-e), (15, 16αB1), (15, 16αA2-a) to (15, 16αA2-e), and (15, 16αB2) can be proteins that are found in a protein spot with a molecular weight of around 20 to 90 kDa, preferably around 30 to 80 kDa, and an isoelectric point of 3.5 to 7.5, preferably 4.0 to 7.0 on gels used in the two-dimensional electrophoresis performed under the conditions described above in the subsection titled “Identification of antigens”.

[0693] Preferably, a protein that is an antigen in spot 15α or 16α has activity equivalent to that of the protein having the amino acid sequence of SEQ ID NO: 291 (UTP-glucose-1-phosphate uridylyltransferase) or the protein having the amino acid sequence of SEQ ID NO: 306 (hypothetical protein GLYMA_02G241100) or causative of an allergy to soybean.

[0694] (17α) Antigen in Spot 17α

[0695] As the result of sequence identification of the antigen in spot 17α by mass spectroscopy, the following amino acid sequences were detected.

(SEQ ID NO: 321)

AVDGSFVFNK

(SEQ ID NO: 322)

FFIYVQNYNESDPK

(SEQ ID NO: 323)

VEFDEEGK

(SEQ ID NO: 324)

VIDLSVDLSAASAAEE

(SEQ ID NO: 325)

VVGVTSEGETAK

(SEQ ID NO: 328)

AVDGSYVFNK

(SEQ ID NO: 329)

FFIYVQNYNESDPK

(SEQ ID NO: 330)

VEFDEEGK

(SEQ ID NO: 331)

VIDLSVDLSAASAAEE

(SEQ ID NO: 332)

VVGVTSEGETAK

[0696] Also, the mass spectroscopic data obtained for spot 17α on a mass spectrometer was analyzed by comparing the data against the NCBI protein data, and as a result, guanosine nucleotide diphosphate dissociation inhibitor 2 (amino acid sequence: SEQ ID NO: 320, encoding nucleotide sequence: SEQ ID NO: 319) was identified as a protein comprising any of SEQ ID NOs: 321 to 325 and rab GDP dissociation inhibitor alpha-like (amino acid sequence: SEQ ID NO: 327, encoding nucleotide sequence: SEQ ID NO: 326) was identified as a protein comprising any of SEQ ID NOs: 328 to 332.

[0697] Accordingly, the antigen in spot 17α in the present invention can be any of proteins selected from the group consisting of the proteins as defined below in (17αA1-a) to (17αA1-e), (17αB1), (17αA2-a) to (17αA2-e), and (17αB2):

(17αA1-a) a protein comprising an amino acid sequence with deletion, substitution, insertion or addition of one or several amino acids in SEQ ID NO: 320;
(17αA1-b) a protein comprising an amino acid sequence having at least 70%, preferably at least 75%, at least 80%, at least 85%, at least 90%, at least 95%, at least 97%, at least 98%, or at least 99% identity to the amino acid sequence of SEQ ID NO: 320;
(17αA1-c) a protein comprising an amino acid sequence encoded by a nucleotide sequence with deletion, substitution, insertion or addition of one or several nucleotides in SEQ ID NO: 319;
(17αA1-d) a protein comprising an amino acid sequence encoded by a nucleotide sequence having at least 70%, preferably at least 75%, at least 80%, at least 85%, at least 90%, at least 95%, at least 97%, at least 98%, or at least 99% identity to the nucleotide sequence of SEQ ID NO: 319;
(17αA1-e) a protein comprising an amino acid sequence encoded by a nucleic acid that hybridizes under stringent conditions with a nucleic acid having a nucleotide sequence complementary to the nucleotide sequence of SEQ ID NO: 319;
(17αB1) a protein comprising at least one amino acid sequence selected from the group consisting of SEQ ID NOs: 321-325, preferably a protein comprising at least 2, 3, or 4 or all sequences of the amino acid sequences. As referred to above, the amino acid sequence of any of SEQ ID NOs: 321 to 325 may be an amino acid sequence derived therefrom by deletion, substitution, insertion or addition of one or several amino acids.
(17αA2-a) a protein comprising an amino acid sequence with deletion, substitution, insertion or addition of one or several amino acids in SEQ ID NO: 327;
(17αA2-b) a protein comprising an amino acid sequence having at least 70%, preferably at least 75%, at least 80%, at least 85%, at least 90%, at least 95%, at least 97%, at least 98%, or at least 99% identity to the amino acid sequence of SEQ ID NO: 327;
(17αA2-c) a protein comprising an amino acid sequence encoded by a nucleotide sequence with deletion, substitution, insertion or addition of one or several nucleotides in SEQ ID NO: 326;
(17αA2-d) a protein comprising an amino acid sequence encoded by a nucleotide sequence having at least 70%, preferably at least 75%, at least 80%, at least 85%, at least 90%, at least 95%, at least 97%, at least 98%, or at least 99% identity to the nucleotide sequence of SEQ ID NO: 326:
(17αA2-e) a protein comprising an amino acid sequence encoded by a nucleic acid that hybridizes under stringent conditions with a nucleic acid having a nucleotide sequence complementary to the nucleotide sequence of SEQ ID NO: 326;
(17αB2) a protein comprising at least one amino acid sequence selected from the group consisting of SEQ ID NOs: 328-332, preferably a protein comprising at least 2, 3, or 4 or all sequences of the amino acid sequences. As referred to above, the amino acid sequence of any of SEQ ID NOs: 328 to 332 may be an amino acid sequence derived therefrom by deletion, substitution, insertion or addition of one or several amino acids;

[0698] The protein selected from the group consisting of the proteins as defined above in (17αA1-a) to (17αA1-e), (17αB1), (17αA2-a) to (17αA2-e), and (17αB2) also include those proteins whose amino acid residues are modified by phosphorylation, sugar chain modification, aminoacylation, ring-opening, deamination or the like.

[0699] The protein selected from the group consisting of the proteins as defined above in (17αA1-a) to (17αA1-e), (17αB1), (17αA2-a) to (17αA2-e), and (17αB2) can be proteins that are found in a protein spot with a molecular weight of around 20 to 90 kDa, preferably around 30 to 80 kDa, and an isoelectric point of 3.5 to 7.5, preferably 4.0 to 7.0 on gels used in the two-dimensional electrophoresis performed under the conditions described above in the subsection titled “Identification of antigens”.

[0700] Preferably, a protein that is an antigen in spot 17α has activity equivalent to that of the protein having the amino acid sequence of SEQ ID NO: 320 (guanosine nucleotide diphosphate dissociation inhibitor 2) or the protein having the amino acid sequence of SEQ ID NO: 327 (rab GDP dissociation inhibitor alpha-like) or causative of an allergy to soybean.

[0701] (18α) Antigen in Spot 18α

[0702] As the result of sequence identification of the antigen in spot 18α by mass spectroscopy, the following amino acid sequences were detected.

(SEQ ID NO: 335)

DFETRVETEGGRIRVLK

(SEQ ID NO: 336)

DNIVSSLDNVAK

(SEQ ID NO: 337)

GRAVLGLVSESETEK

(SEQ ID NO: 338)

LFDQQNEGSIFAISREQVRALAPTK

(SEQ ID NO: 339)

RPTISNGYGRLTEVGPDDDEK

[0703] Also, the mass spectroscopic data obtained for spot 18α on a mass spectrometer was analyzed by comparing the data against the NCBI protein data, and as a result, hypothetical protein GLYMA_10G028300 (amino acid sequence: SEQ ID NO: 334, encoding nucleotide sequence: SEQ ID NO: 333) was identified as a protein comprising any of SEQ ID NOs: 335 to 339.

[0704] Accordingly, the antigens in spot 18α in the present invention can be any protein selected from the group consisting of the proteins as defined below in (18αA-a) to (18αA-e) and (18αB):

(18αA-a) a protein comprising an amino acid sequence with deletion, substitution, insertion or addition of one or several amino acids in SEQ ID NO: 334;
(18αA-b) a protein comprising an amino acid sequence having at least 70%, preferably at least 75%, at least 80%, at least 85%, at least 90%, at least 95%, at least 97%, at least 98%, or at least 99% identity to the amino acid sequence of SEQ ID NO: 334;
(18αA-c) a protein comprising an amino acid sequence encoded by a nucleotide sequence with deletion, substitution, insertion or addition of one or several nucleotides in SEQ ID NO: 333;
(18αA-d) a protein comprising an amino acid sequence encoded by a nucleotide sequence having at least 70%, preferably at least 75%, at least 80%, at least 85%, at least 90%, at least 95%, at least 97%, at least 98%, or at least 99% identity to the nucleotide sequence of SEQ ID NO: 333:
(18αA-e) a protein comprising an amino acid sequence encoded by a nucleic acid that hybridizes under stringent conditions with a nucleic acid having a nucleotide sequence complementary to the nucleotide sequence of SEQ ID NO: 333;
(18αB) a protein comprising at least one amino acid sequence selected from the group consisting of SEQ ID NOs: 335-339, preferably a protein comprising at least 2, 3 or 4 or all sequences of the amino acid sequences. As referred to above, the amino acid sequence of any of SEQ ID NOs: 335-339 may be an amino acid sequence derived therefrom by deletion, substitution, insertion or addition of one or several amino acids.

[0705] The proteins selected from the group consisting of (18αA-a) to (18αA-e) and (18αB) as defined above also include those proteins whose amino acid residues are modified by phosphorylation, sugar chain modification, aminoacylation, ring-opening, deamination or the like.

[0706] The proteins selected from the group consisting of (18αA-a) to (18αA-e) and (18αB) as defined above can be proteins that are found in a protein spot with a molecular weight of around 30 to 90 kDa, preferably around 40 to 80 kDa and an isoelectric point of 3.5 to 8.5, preferably 4.0 to 8.0 on gels used in the two-dimensional electrophoresis performed under the conditions described above in the subsection titled “Identification of antigens”.

[0707] Preferably, a protein that is an antigen in spot 18α has activity equivalent to that of the protein having the amino acid sequence of SEQ ID NO: 334 (hypothetical protein GLYMA_10G028300) or causative of an allergy to soybean.

[0708] (19α) Antigen in Spot 19α

[0709] As the result of sequence identification of the antigen in spot 19α by mass spectroscopy, the following amino acid sequences were detected.

(SEQ ID NO: 342)

AQFNIFSK

(SEQ ID NO: 343)

DFSTRVETEGGSIRVLK

(SEQ ID NO: 344)

DNIVSSLDNVAK

(SEQ ID NO: 345)

GRAVLGLVRESETEK

(SEQ ID NO: 346)

RPTFSNGYGRLTEVGPDDEK

[0710] Also, the mass spectroscopic data obtained for spot 19α on a mass spectrometer was analyzed by comparing the data against the NCBI protein data, and as a result, sucrose binding protein homolog S-64 (amino acid sequence: SEQ ID NO: 341, encoding nucleotide sequence: SEQ ID NO: 340) was identified as a protein comprising any of SEQ ID NOs: 342 to 346.

[0711] Accordingly, the antigens in spot 19α in the present invention can be any protein selected from the group consisting of the proteins as defined below in (19αA-a) to (19αA-e) and (19αB):

(19αA-a) a protein comprising an amino acid sequence with deletion, substitution, insertion or addition of one or several amino acids in SEQ ID NO: 341;
(19αA-b) a protein comprising an amino acid sequence having at least 70%, preferably at least 75%, at least 80%, at least 85%, at least 90%, at least 95%, at least 97%, at least 98%, or at least 99% identity to the amino acid sequence of SEQ ID NO: 341;
(19αA-c) a protein comprising an amino acid sequence encoded by a nucleotide sequence with deletion, substitution, insertion or addition of one or several nucleotides in SEQ ID NO: 340;
(19αA-d) a protein comprising an amino acid sequence encoded by a nucleotide sequence having at least 70%, preferably at least 75%, at least 80%, at least 85%, at least 90%, at least 95%, at least 97%, at least 98%, or at least 99% identity to the nucleotide sequence of SEQ ID NO: 340;
(19αA-e) a protein comprising an amino acid sequence encoded by a nucleic acid that hybridizes under stringent conditions with a nucleic acid having a nucleotide sequence complementary to the nucleotide sequence of SEQ ID NO: 340;
(19αB) a protein comprising at least one amino acid sequence selected from the group consisting of SEQ ID NOs: 342-346, preferably a protein comprising at least 2, 3 or 4 or all sequences of the amino acid sequences. As referred to above, the amino acid sequence of any of SEQ ID NOs: 342-346 may be an amino acid sequence derived therefrom by deletion, substitution, insertion or addition of one or several amino acids.

[0712] The proteins selected from the group consisting of (19αA-a) to (19αA-e) and (19αB) as defined above also include those proteins whose amino acid residues are modified by phosphorylation, sugar chain modification, aminoacylation, ring-opening, deamination or the like.

[0713] The proteins selected from the group consisting of (19αA-a) to (19αA-e) and (19αB) as defined above can be proteins that are found in a protein spot with a molecular weight of around 30 to 90 kDa, preferably around 40 to 80 kDa and an isoelectric point of 3.5 to 8.5, preferably 4.0 to 8.0 on gels used in the two-dimensional electrophoresis performed under the conditions described above in the subsection titled “Identification of antigens”.

[0714] Preferably, a protein that is an antigen in spot 19α has activity equivalent to that of the protein having the amino acid sequence of SEQ ID NO: 341 (sucrose binding protein homolog S-64) or causative of an allergy to soybean.

[0715] (25α) Antigen in Spot 25α

[0716] As the result of sequence identification of the antigen in spot 25α by mass spectroscopy, the following amino acid sequences were detected.

(SEQ ID NO: 349)

DLFPNENELVVK

(SEQ ID NO: 350)

EIFSLRDTTQEDPREVTAAK

(SEQ ID NO: 351)

LHGGTPANFLDVGGNASENQVVEAFK

(SEQ ID NO: 352)

LNFDDNAAYRQK

(SEQ ID NO: 353)

SQILAGGRGLGTFK

(SEQ ID NO: 354)

TDQVEDIAGK

(SEQ ID NO: 355)

VPVVVRLEGTNVDQGK

(SEQ ID NO: 356)

VVDGLALK

(SEQ ID NO: 359)

DLFPNENELVVK

(SEQ ID NO: 360)

EIFALRDTTQEDPREVTAAK

(SEQ ID NO: 361)

LHGGTPANFLDVGGNASEGQVVEAFK

(SEQ ID NO: 362)

LNFDDNAAYRQK

(SEQ ID NO: 363)

SQILAGGRGLGTFK

(SEQ ID NO: 364)

TDQVEDIAGK

(SEQ ID NO: 365)

VVDGLALK

[0717] Also, the mass spectroscopic data obtained for spot 25α on a mass spectrometer was analyzed by comparing the data against the NCBI protein data, and as a result, succinyl-CoA ligase [ADP-forming] subunit beta, mitochondrial (amino acid sequence: SEQ ID NO: 348, encoding nucleotide sequence: SEQ ID NO: 347) was identified as a protein comprising any of SEQ ID NOs: 349 to 356 and succinyl-CoA ligase [ADP-forming] subunit beta, mitochondrial (amino acid sequence: SEQ ID NO: 358, encoding nucleotide sequence: SEQ ID NO: 357) was identified as a protein comprising any of SEQ ID NOs: 359 to 365.

[0718] Accordingly, the antigen in spot 25α in the present invention can be any of proteins selected from the group consisting of the proteins as defined below in (25αA1-a) to (25αA1-e), (25αB1), (25αA2-a) to (25αA2-e), and (25αB2):

(25αA1-a) a protein comprising an amino acid sequence with deletion, substitution, insertion or addition of one or several amino acids in SEQ ID NO: 348;
(25αA1-b) a protein comprising an amino acid sequence having at least 70%, preferably at least 75%, at least 80%, at least 85%, at least 90%, at least 95%, at least 97%, at least 98%, or at least 99% identity to the amino acid sequence of SEQ ID NO: 348;
(25αA1-c) a protein comprising an amino acid sequence encoded by a nucleotide sequence with deletion, substitution, insertion or addition of one or several nucleotides in SEQ ID NO: 347;
(25αA1-d) a protein comprising an amino acid sequence encoded by a nucleotide sequence having at least 70%, preferably at least 75%, at least 80%, at least 85%, at least 90%, at least 95%, at least 97%, at least 98%, or at least 99% identity to the nucleotide sequence of SEQ ID NO: 347;
(25αA1-e) a protein comprising an amino acid sequence encoded by a nucleic acid that hybridizes under stringent conditions with a nucleic acid having a nucleotide sequence complementary to the nucleotide sequence of SEQ ID NO: 347;
(25αB1) a protein comprising at least one amino acid sequence selected from the group consisting of SEQ ID NOs: 349-356, preferably a protein comprising at least 2, 3, 4, 5, 6, or 7 or all sequences of the amino acid sequences. As referred to above, the amino acid sequence of any of SEQ ID NOs: 349 to 356 may be an amino acid sequence derived therefrom by deletion, substitution, insertion or addition of one or several amino acids;
(25αA2-a) a protein comprising an amino acid sequence with deletion, substitution, insertion or addition of one or several amino acids in SEQ ID NO: 358;
(25αA2-b) a protein comprising an amino acid sequence having at least 70%, preferably at least 75%, at least 80%, at least 85%, at least 90%, at least 95%, at least 97%, at least 98%, or at least 99% identity to the amino acid sequence of SEQ ID NO: 358;
(25αA2-c) a protein comprising an amino acid sequence encoded by a nucleotide sequence with deletion, substitution, insertion or addition of one or several nucleotides in SEQ ID NO: 357;
(25αA2-d) a protein comprising an amino acid sequence encoded by a nucleotide sequence having at least 70%, preferably at least 75%, at least 80%, at least 85%, at least 90%, at least 95%, at least 97%, at least 98%, or at least 99% identity to the nucleotide sequence of SEQ ID NO: 357;
(25αA2-e) a protein comprising an amino acid sequence encoded by a nucleic acid that hybridizes under stringent conditions with a nucleic acid having a nucleotide sequence complementary to the nucleotide sequence of SEQ ID NO: 357;
(25αB2) a protein comprising at least one amino acid sequence selected from the group consisting of SEQ ID NOs: 359-365, preferably a protein comprising at least 2, 3, 4, 5, or 6 or all sequences of the amino acid sequences. As referred to above, the amino acid sequence of any of SEQ ID NOs: 359 to 365 may be an amino acid sequence derived therefrom by deletion, substitution, insertion or addition of one or several amino acids.

[0719] The protein selected from the group consisting of the proteins as defined above in (25αA1-a) to (25αA1-e), (25αB1), (25αA2-a) to (25αA2-e), and (25αB2) also include those proteins whose amino acid residues are modified by phosphorylation, sugar chain modification, aminoacylation, ring-opening, deamination or the like.

[0720] The protein selected from the group consisting of the proteins as defined above in (25αA1-a) to (25αA1-e), (25αB1), (25αA2-a) to (25αA2-e), and (25αB2) can be proteins that are found in a protein spot with a molecular weight of around 20 to 90 kDa, preferably around 30 to 80 kDa, and an isoelectric point of 3.5 to 7.5, preferably 4.0 to 7.0 on gels used in the two-dimensional electrophoresis performed under the conditions described above in the subsection titled “Identification of antigens”.

[0721] Preferably, a protein that is an antigen in spot 25α has activity equivalent to that of the protein having the amino acid sequence of SEQ ID NO: 348 or 358 (succinyl-CoA ligase [ADP-forming] subunit beta, mitochondrial) or causative of an allergy to soybean.

[0722] (26α) Antigen in Spot 26α

[0723] As the result of sequence identification of the antigen in spot 26α by mass spectroscopy, the following amino acid sequences were detected.

(SEQ ID NO: 368)

AQGYSVGSSLVEEDK

(SEQ ID NO: 369)

ELDYLVGAVSNPK

(SEQ ID NO: 370)

FAADANSK

(SEQ ID NO: 371)

FATGTEAIAK

(SEQ ID NO: 372)

GVSLLLPTDVVIADK

(SEQ ID NO: 373)

GVTTIIGGGDSVAAVEK

(SEQ ID NO: 374)

IGVIESLLEK

(SEQ ID NO: 375)

LASLADLYVNDAFGTAHRAHASTEGVAK

(SEQ ID NO: 376)

LSLATTLLEK

(SEQ ID NO: 377)

LVTQLPEGGVLLLENVRFYK

(SEQ ID NO: 378)

NDPEFAK

(SEQ ID NO: 379)

QLPGVLALDDA

(SEQ ID NO: 380)

RPFAAIVGGSK

(SEQ ID NO: 381)

VILSSHLGRPK

(SEQ ID NO: 382)

YLTGYGAK

(SEQ ID NO: 385)

ELDYLVGAVSNPK

(SEQ ID NO: 386)

ELPGVLALDEAVPVAV

(SEQ ID NO: 387)

FAVGTEAIAK

(SEQ ID NO: 388)

GVSLLLPSDVVIADK

(SEQ ID NO: 389)

GVTTIIGGGDSVAAVEK

(SEQ ID NO: 390)

IGVIESLLEK

(SEQ ID NO: 391)

RPFAAIVGGSK

(SEQ ID NO: 392)

VILSSHLGRPK

(SEQ ID NO: 395)

AQGYSVGSSLVEEDK

(SEQ ID NO: 396)

ELDYLVGAVSNPK

(SEQ ID NO: 397)

FAADANSK

(SEQ ID NO: 398)

FATGTEAIAK

(SEQ ID NO: 399)

GVSLLLPTDVVIADK

(SEQ ID NO: 400)

GVTTIIGGGDSVAAVEK

(SEQ ID NO: 401)

IGVIESLLEK

(SEQ ID NO: 402)

LASLADLYVNDAFGTAHRAHASTEGVAK

(SEQ ID NO: 403)

LSLATTLLEK

(SEQ ID NO: 404)

LVAQLPEGGVLLLENVRFYK

(SEQ ID NO: 405)

NDPEFAK

(SEQ ID NO: 406)

QLPGVLALDDA

(SEQ ID NO: 407)

RPFAAIVGGSK

(SEQ ID NO: 408)

TFGEALDK

(SEQ ID NO: 409)

VILSSHLGRPK

[0724] Also, the mass spectroscopic data obtained for spot 26α on a mass spectrometer was analyzed by comparing the data against the NCBI protein data, and as a result, phosphoglycerate kinase, cytosolic (amino acid sequence: SEQ ID NO: 367, encoding nucleotide sequence: SEQ ID NO: 366) was identified as a protein comprising any of SEQ ID NOs: 368 to 382, phosphoglycerate kinase, cytosolic (amino acid sequence: SEQ ID NO: 384, encoding nucleotide sequence: SEQ ID NO: 383) was identified as a protein comprising any of SEQ ID NOs: 385 to 392, and phosphoglycerate kinase, cytosolic (amino acid sequence: SEQ ID NO: 394, encoding nucleotide sequence: SEQ ID NO: 393) was identified as a protein comprising any of SEQ ID NOs: 395 to 409.

[0725] Accordingly, the antigen in spot 26α in the present invention can be any of proteins selected from the group consisting of the proteins as defined below in (26αA1-a) to (26αA1-e), (26αB1), (26αA2-a) to (26αA2-e), (26αB2), (26αA3-a) to (26αA3-e), and (26αB3):

(26αA1-a) a protein comprising an amino acid sequence with deletion, substitution, insertion or addition of one or several amino acids in SEQ ID NO: 367;
(26αA1-b) a protein comprising an amino acid sequence having at least 70%, preferably at least 75%, at least 80%, at least 85%, at least 90%, at least 95%, at least 97%, at least 98%, or at least 99% identity to the amino acid sequence of SEQ ID NO: 367;
(26αA1-c) a protein comprising an amino acid sequence encoded by a nucleotide sequence with deletion, substitution, insertion or addition of one or several nucleotides in SEQ ID NO: 366;
(26αA1-d) a protein comprising an amino acid sequence encoded by a nucleotide sequence having at least 70%, preferably at least 75%, at least 80%, at least 85%, at least 90%, at least 95%, at least 97%, at least 98%, or at least 99% identity to the nucleotide sequence of SEQ ID NO: 366;
(26αA1-e) a protein comprising an amino acid sequence encoded by a nucleic acid that hybridizes under stringent conditions with a nucleic acid having a nucleotide sequence complementary to the nucleotide sequence of SEQ ID NO: 366;
(26αB1) a protein comprising at least one amino acid sequence selected from the group consisting of SEQ ID NOs: 368-382, preferably a protein comprising at least 2, 3, 4, 5, 6, 7, 8, 9, 10, 11, 12, 13, or 14 or all sequences of the amino acid sequences. As referred to above, the amino acid sequence of any of SEQ ID NOs: 368 to 382 may be an amino acid sequence derived therefrom by deletion, substitution, insertion or addition of one or several amino acids;
(26αA2-a) a protein comprising an amino acid sequence with deletion, substitution, insertion or addition of one or several amino acids in SEQ ID NO: 384;
(26αA2-b) a protein comprising an amino acid sequence having at least 70%, preferably at least 75%, at least 80%, at least 85%, at least 90%, at least 95%, at least 97%, at least 98%, or at least 99% identity to the amino acid sequence of SEQ ID NO: 384;
(26αA2-c) a protein comprising an amino acid sequence encoded by a nucleotide sequence with deletion, substitution, insertion or addition of one or several nucleotides in SEQ ID NO: 383;
(26αA2-d) a protein comprising an amino acid sequence encoded by a nucleotide sequence having at least 70%, preferably at least 75%, at least 80%, at least 85%, at least 90%, at least 95%, at least 97%, at least 98%, or at least 99% identity to the nucleotide sequence of SEQ ID NO: 383:
(26αA2-e) a protein comprising an amino acid sequence encoded by a nucleic acid that hybridizes under stringent conditions with a nucleic acid having a nucleotide sequence complementary to the nucleotide sequence of SEQ ID NO: 383;
(26αB2) a protein comprising at least one amino acid sequence selected from the group consisting of SEQ ID NOs: 385-392, preferably a protein comprising at least 2, 3, 4, 5, 6, or 7 or all sequences of the amino acid sequences. As referred to above, the amino acid sequence of any of SEQ ID NOs: 385 to 392 may be an amino acid sequence derived therefrom by deletion, substitution, insertion or addition of one or several amino acids.
(26αA3-a) a protein comprising an amino acid sequence with deletion, substitution, insertion or addition of one or several amino acids in SEQ ID NO: 394;
(26αA3-b) a protein comprising an amino acid sequence having at least 70%, preferably at least 75%, at least 80%, at least 85%, at least 90%, at least 95%, at least 97%, at least 98%, or at least 99% identity to the amino acid sequence of SEQ ID NO: 394;
(26αA3-c) a protein comprising an amino acid sequence encoded by a nucleotide sequence with deletion, substitution, insertion or addition of one or several nucleotides in SEQ ID NO: 393;
(26αA3-d) a protein comprising an amino acid sequence encoded by a nucleotide sequence having at least 70%, preferably at least 75%, at least 80%, at least 85%, at least 90%, at least 95%, at least 97%, at least 98%, or at least 99% identity to the nucleotide sequence of SEQ ID NO: 393;
(26αA3-e) a protein comprising an amino acid sequence encoded by a nucleic acid that hybridizes under stringent conditions with a nucleic acid having a nucleotide sequence complementary to the nucleotide sequence of SEQ ID NO: 393;
(26αB3) a protein comprising at least one amino acid sequence selected from the group consisting of SEQ ID NOs: 395-409, preferably a protein comprising at least 2, 3, 4, 5, 6, 7, 8, 9, 10, 11, 12, 13, or 14 or all sequences of the amino acid sequences. As referred to above, the amino acid sequence of any of SEQ ID NOs: 395 to 409 may be an amino acid sequence derived therefrom by deletion, substitution, insertion or addition of one or several amino acids.

[0726] The protein selected from the group consisting of the proteins as defined above in (26αA1-a) to (26αA1-e), (26αB1), (26αA2-a) to (26αA2-e), (26αB2), (26αA3-a) to (26αA3-e), and (26αB3) also include those proteins whose amino acid residues are modified by phosphorylation, sugar chain modification, aminoacylation, ring-opening, deamination or the like.

[0727] The protein selected from the group consisting of the proteins as defined above in (26αA1-a) to (26αA1-e), (26αB1), (26αA2-a) to (26αA2-e), (26αB2), (26αA3-a) to (26αA3-e), and (26αB3) can be proteins that are found in a protein spot with a molecular weight of around 20 to 90 kDa, preferably around 30 to 80 kDa, and an isoelectric point of 3.5 to 7.5, preferably 4.0 to 7.0 on gels used in the two-dimensional electrophoresis performed under the conditions described above in the subsection titled “Identification of antigens”.

[0728] Preferably, a protein that is an antigen in spot 25α has activity equivalent to that of the protein having the amino acid sequence of SEQ ID NO: 367, 384, or 394 (phosphoglycerate kinase, cytosolic) or causative of an allergy to soybean.

[0729] (270) Antigen in Spot 27α

[0730] As the result of sequence identification of the antigen in spot 27α by mass spectroscopy, the following amino acid sequences were detected.

(SEQ ID NO: 412)

FGVNEFVNPK

(SEQ ID NO: 413)

FITHTVPFSEINK

(SEQ ID NO: 414)

GTFYGNYKPRTDLPSVVEK

(SEQ ID NO: 415)

THPVNFLNERTLK

(SEQ ID NO: 416)

VNPAAPLDK

(SEQ ID NO: 419)

GTFYGHYRPRTDIPGVVEK

(SEQ ID NO: 420)

INPNAPLDK

(SEQ ID NO: 423)

FGVNEFVNPK

(SEQ ID NO: 424)

FITHTVPFSEINK

(SEQ ID NO: 425)

GTFYGNYKPRTDLPSVVEK

(SEQ ID NO: 426)

INPAAPLDK

(SEQ ID NO: 427)

TAPINFLNERTLK

[0731] Also, the mass spectroscopic data obtained for spot 27α on a mass spectrometer was analyzed by comparing the data against the NCBI protein data, and as a result, alcohol dehydrogenase 1 (amino acid sequence: SEQ ID NO: 411, encoding nucleotide sequence: SEQ ID NO: 410) was identified as a protein comprising any of SEQ ID NOs: 412 to 416, alcohol dehydrogenase 1 (amino acid sequence: SEQ ID NO: 418, encoding nucleotide sequence: SEQ ID NO: 417) was identified as a protein comprising any of SEQ ID NOs: 419 and 420, and alcohol dehydrogenase 1-like (amino acid sequence: SEQ ID NO: 422, encoding nucleotide sequence: SEQ ID NO: 421) was identified as a protein comprising any of SEQ ID NOs: 423 to 427.

[0732] Accordingly, the antigen in spot 27α in the present invention can be any of proteins selected from the group consisting of the proteins as defined below in (27αA1-a) to (27αA1-e), (27αB1), (27αA2-a) to (27αA2-e), (27αB2), (27αA3-a) to (27αA3-e), and (27αB3):

(27αA1-a) a protein comprising an amino acid sequence with deletion, substitution, insertion or addition of one or several amino acids in SEQ ID NO: 411;
(27αA1-b) a protein comprising an amino acid sequence having at least 70%, preferably at least 75%, at least 80%, at least 85%, at least 90%, at least 95%, at least 97%, at least 98%, or at least 99% identity to the amino acid sequence of SEQ ID NO: 411;
(27αA1-c) a protein comprising an amino acid sequence encoded by a nucleotide sequence with deletion, substitution, insertion or addition of one or several nucleotides in SEQ ID NO: 410;
(27αA1-d) a protein comprising an amino acid sequence encoded by a nucleotide sequence having at least 70%, preferably at least 75%, at least 80%, at least 85%, at least 90%, at least 95%, at least 97%, at least 98%, or at least 99% identity to the nucleotide sequence of SEQ ID NO: 410:
(27αA1-e) a protein comprising an amino acid sequence encoded by a nucleic acid that hybridizes under stringent conditions with a nucleic acid having a nucleotide sequence complementary to the nucleotide sequence of SEQ ID NO: 410;
(27αB1) a protein comprising at least one amino acid sequence selected from the group consisting of SEQ ID NOs: 412-416, preferably a protein comprising at least 2, 3, or 4 or all sequences of the amino acid sequences. As referred to above, the amino acid sequence of any of SEQ ID NOs: 412 to 416 may be an amino acid sequence derived therefrom by deletion, substitution, insertion or addition of one or several amino acids;
(27αA2-a) a protein comprising an amino acid sequence with deletion, substitution, insertion or addition of one or several amino acids in SEQ ID NO: 418;
(27αA2-b) a protein comprising an amino acid sequence having at least 70%, preferably at least 75%, at least 80%, at least 85%, at least 90%, at least 95%, at least 97%, at least 98%, or at least 99% identity to the amino acid sequence of SEQ ID NO: 418;
(27αA2-c) a protein comprising an amino acid sequence encoded by a nucleotide sequence with deletion, substitution, insertion or addition of one or several nucleotides in SEQ ID NO: 417;
(27αA2-d) a protein comprising an amino acid sequence encoded by a nucleotide sequence having at least 70%, preferably at least 75%, at least 80%, at least 85%, at least 90%, at least 95%, at least 97%, at least 98%, or at least 99% identity to the nucleotide sequence of SEQ ID NO: 417:
(27αA2-e) a protein comprising an amino acid sequence encoded by a nucleic acid that hybridizes under stringent conditions with a nucleic acid having a nucleotide sequence complementary to the nucleotide sequence of SEQ ID NO: 417;
(27αB2) a protein comprising at least one amino acid sequence selected from the group consisting of SEQ ID NOs: 419 and 420, preferably a protein comprising both the amino acid sequences. As referred to above, the amino acid sequence of any of SEQ ID NOs: 419, 420 may be an amino acid sequence derived therefrom by deletion, substitution, insertion or addition of one or several amino acids.
(27αA3-a) a protein comprising an amino acid sequence with deletion, substitution, insertion or addition of one or several amino acids in SEQ ID NO: 422;
(27αA3-b) a protein comprising an amino acid sequence having at least 70%, preferably at least 75%, at least 80%, at least 85%, at least 90%, at least 95%, at least 97%, at least 98%, or at least 99% identity to the amino acid sequence of SEQ ID NO: 422;
(27αA3-c) a protein comprising an amino acid sequence encoded by a nucleotide sequence with deletion, substitution, insertion or addition of one or several nucleotides in SEQ ID NO: 421;
(27αA3-d) a protein comprising an amino acid sequence encoded by a nucleotide sequence having at least 70%, preferably at least 75%, at least 80%, at least 85%, at least 90%, at least 95%, at least 97%, at least 98%, or at least 99% identity to the nucleotide sequence of SEQ ID NO: 421;
(27αA3-e) a protein comprising an amino acid sequence encoded by a nucleic acid that hybridizes under stringent conditions with a nucleic acid having a nucleotide sequence complementary to the nucleotide sequence of SEQ ID NO: 421;
(27αB3) a protein comprising at least one amino acid sequence selected from the group consisting of SEQ ID NOs: 423-427, preferably a protein comprising at least 2, 3, or 4 or all sequences of the amino acid sequences. As referred to above, the amino acid sequence of any of SEQ ID NOs: 423 to 427 may be an amino acid sequence derived therefrom by deletion, substitution, insertion or addition of one or several amino acids.
The protein selected from the group consisting of the proteins as defined above in (27αA1-a) to (27αA1-e), (27αB1), (27αA2-a) to (27αA2-e), (27αB2), (27αA3-a) to (27αA3-e), and (27αB3) also include those proteins whose amino acid residues are modified by phosphorylation, sugar chain modification, aminoacylation, ring-opening, deamination or the like.

[0733] The protein selected from the group consisting of the proteins as defined above in (27αA1-a) to (27αA1-e), (27αB1), (27αA2-a) to (27αA2-e), (27αB2), (27αA3-a) to (27αA3-e), and (27αB3) can be proteins that are found in a protein spot with a molecular weight of around 20 to 90 kDa, preferably around 30 to 80 kDa, and an isoelectric point of 3.5 to 7.5, preferably 4.0 to 7.0 on gels used in the two-dimensional electrophoresis performed under the conditions described above in the subsection titled “Identification of antigens”.

[0734] Preferably, a protein that is an antigen in spot 27α has activity equivalent to that of the protein having the amino acid sequence of SEQ ID NO: 411 or 418 (alcohol dehydrogenase 1) or the protein having the amino acid sequence of SEQ ID NO: 422 (alcohol dehydrogenase 1-like) or causative of an allergy to soybean.

[0735] (28α) Antigen in Spot 28α

[0736] As the result of sequence identification of the antigen in spot 28α by mass spectroscopy, the following amino acid sequences were detected.

(SEQ ID NO: 430)

AGEYTDYAAQK

(SEQ ID NO: 431)

DIGDINRTNERDEGYDLHDEANFK

(SEQ ID NO: 432)

DLEDANRLRDNTFNTWK

(SEQ ID NO: 433)

EAVVGKPHHEEVYAK

[0737] Also, the mass spectroscopic data obtained for spot 28α on a mass spectrometer was analyzed by comparing the data against the NCBI protein data, and as a result, 35 kDa seed maturation protein isoform X1 (amino acid sequence: SEQ ID NO: 429, encoding nucleotide sequence: SEQ ID NO: 428) was identified as a protein comprising any of SEQ ID NO: 430 to 433.

[0738] Accordingly, the antigens in spot 28α in the present invention can be any protein selected from the group consisting of the proteins as defined below in (28αA-a) to (28αA-e) and (28αB):

(28αA-a) a protein comprising an amino acid sequence with deletion, substitution, insertion or addition of one or several amino acids in SEQ ID NO: 429;
(28αA-b) a protein comprising an amino acid sequence having at least 70%, preferably at least 75%, at least 80%, at least 85%, at least 90%, at least 95%, at least 97%, at least 98%, or at least 99% identity to the amino acid sequence of SEQ ID NO: 429;
(28αA-c) a protein comprising an amino acid sequence encoded by a nucleotide sequence with deletion, substitution, insertion or addition of one or several nucleotides in SEQ ID NO: 428;
(28αA-d) a protein comprising an amino acid sequence encoded by a nucleotide sequence having at least 70%, preferably at least 75%, at least 80%, at least 85%, at least 90%, at least 95%, at least 97%, at least 98%, or at least 99% identity to the nucleotide sequence of SEQ ID NO: 428;
(28αA-e) a protein comprising an amino acid sequence encoded by a nucleic acid that hybridizes under stringent conditions with a nucleic acid having a nucleotide sequence complementary to the nucleotide sequence of SEQ ID NO: 428;
(28αB) a protein comprising at least one amino acid sequence selected from the group consisting of SEQ ID NOs: 430-433, preferably a protein comprising at least 2 or 3 or all sequences of the amino acid sequences. As referred to above, the amino acid sequence of any of SEQ ID NOs: 430-433 may be an amino acid sequence derived therefrom by deletion, substitution, insertion or addition of one or several amino acids.

[0739] The proteins selected from the group consisting of (28αA-a) to (28αA-e) and (28αB) as defined above also include those proteins whose amino acid residues are modified by phosphorylation, sugar chain modification, aminoacylation, ring-opening, deamination or the like.

[0740] The proteins selected from the group consisting of (28αA-a) to (28αA-e) and (28αB) as defined above can be proteins that are found in a protein spot with a molecular weight of around 10 to 70 kDa, preferably around 20 to 60 kDa and an isoelectric point of 3.5 to 7.5, preferably 4.0 to 7.0 on gels used in the two-dimensional electrophoresis performed under the conditions described above in the subsection titled “Identification of antigens”.

[0741] Preferably, a protein that is an antigen in spot 28α has activity equivalent to that of the protein having the amino acid sequence of SEQ ID NO: 422 (35 kDa seed maturation protein isoform X1) or causative of an allergy to soybean.

[0742] (29α, 30α, 31α, 32α, 33α) Antigens in Spots 29α to 33α

[0743] As the result of sequence identification of the antigens in spots 29α to 33α by mass spectroscopy, the following amino acid sequences were detected.

(SEQ ID NO: 436)

EASYDEIK

(SEQ ID NO: 437)

GILGYTEDDVVSTDFIGDSRSSIFDAK

(SEQ ID NO: 438)

VIISAPSK

(SEQ ID NO: 439)

VLPALNGK

(SEQ ID NO: 442)

EASYDEIK

(SEQ ID NO: 443)

GILGYTEDDVVSTDFVGDSRSSIFDAK

(SEQ ID NO: 444)

VIISAPSK

(SEQ ID NO: 445)

VLPALNGK

(SEQ ID NO: 448)

AGISLNDNFVK

(SEQ ID NO: 449)

GILGYTEDDVVSTDFVGDNRSSIFDAK

(SEQ ID NO: 450)

VLPALNGK

(SEQ ID NO: 451)

VVISAPSK

[0744] Also, the mass spectroscopic data obtained for spots 29α to 33α on a mass spectrometer was analyzed by comparing the data against the NCBI protein data, and as a result, glyceraldehyde-3-phosphate dehydrogenase isoform X1 (amino acid sequence: SEQ ID NO: 435, encoding nucleotide sequence: SEQ ID NO: 434) was identified as a protein comprising any of SEQ ID NO: 436 to 439, glyceraldehyde-3-phosphate dehydrogenase, cytosolic (amino acid sequence: SEQ ID NO: 441, encoding nucleotide sequence: SEQ ID NO: 440) was identified as a protein comprising any of SEQ ID NO: 442 to 445, and uncharacterized protein LOC100782924 (amino acid sequence: SEQ ID NO: 447, encoding nucleotide sequence: SEQ ID NO: 446) was identified as a protein comprising any of SEQ ID NO: 448 to 451.

[0745] Accordingly, the antigen in spot 29α to 33α in the present invention can be any of proteins selected from the group consisting of the proteins as defined below in (29-33αA1-a) to (29-33αA1-e), (29-33αB1), (29-33αA2-a) to (29-33αA2-e), (29-33αB2), (29-33αA3-a) to (29-33αA3-e), and (29-33αB3):

(29-33αA1-a) a protein comprising an amino acid sequence with deletion, substitution, insertion or addition of one or several amino acids in SEQ ID NO: 435;
(29-33αA1-b) a protein comprising an amino acid sequence having at least 70%, preferably at least 75%, at least 80%, at least 85%, at least 90%, at least 95%, at least 97%, at least 98%, or at least 99% identity to the amino acid sequence of SEQ ID NO: 435;
(29-33αA1-c) a protein comprising an amino acid sequence encoded by a nucleotide sequence with deletion, substitution, insertion or addition of one or several nucleotides in SEQ ID NO: 434;
(29-33αA1-d) a protein comprising an amino acid sequence encoded by a nucleotide sequence having at least 70%, preferably at least 75%, at least 80%, at least 85%, at least 90%, at least 95%, at least 97%, at least 98%, or at least 99% identity to the nucleotide sequence of SEQ ID NO: 434;
(29-33αA1-e) a protein comprising an amino acid sequence encoded by a nucleic acid that hybridizes under stringent conditions with a nucleic acid having a nucleotide sequence complementary to the nucleotide sequence of SEQ ID NO: 434;
(29-33αB1) a protein comprising at least one amino acid sequence selected from the group consisting of SEQ ID NOs: 436-439, preferably a protein comprising at least 2, 3, or all sequences of the amino acid sequences. As referred to above, the amino acid sequence of any of SEQ ID NOs: 436 to 439 may be an amino acid sequence derived therefrom by deletion, substitution, insertion or addition of one or several amino acids;
(29-33αA2-a) a protein comprising an amino acid sequence with deletion, substitution, insertion or addition of one or several amino acids in SEQ ID NO: 441;
(29-33αA2-b) a protein comprising an amino acid sequence having at least 70%, preferably at least 75%, at least 80%, at least 85%, at least 90%, at least 95%, at least 97%, at least 98%, or at least 99% identity to the amino acid sequence of SEQ ID NO: 441;
(29-33αA2-c) a protein comprising an amino acid sequence encoded by a nucleotide sequence with deletion, substitution, insertion or addition of one or several nucleotides in SEQ ID NO: 440;
(29-33αA2-d) a protein comprising an amino acid sequence encoded by a nucleotide sequence having at least 70%, preferably at least 75%, at least 80%, at least 85%, at least 90%, at least 95%, at least 97%, at least 98%, or at least 99% identity to the nucleotide sequence of SEQ ID NO: 440;
(29-33αA2-e) a protein comprising an amino acid sequence encoded by a nucleic acid that hybridizes under stringent conditions with a nucleic acid having a nucleotide sequence complementary to the nucleotide sequence of SEQ ID NO: 440;
(29-33αB2) a protein comprising at least one amino acid sequence selected from the group consisting of SEQ ID NOs: 442-445, preferably a protein comprising at least 2, 3, or all sequences of the amino acid sequences. As referred to above, the amino acid sequence of any of SEQ ID NOs: 442 to 445 may be an amino acid sequence derived therefrom by deletion, substitution, insertion or addition of one or several amino acids.
(29-33αA3-a) a protein comprising an amino acid sequence with deletion, substitution, insertion or addition of one or several amino acids in SEQ ID NO: 447;
(29-33αA3-b) a protein comprising an amino acid sequence having at least 70%, preferably at least 75%, at least 80%, at least 85%, at least 90%, at least 95%, at least 97%, at least 98%, or at least 99% identity to the amino acid sequence of SEQ ID NO: 447;
(29-33αA3-c) a protein comprising an amino acid sequence encoded by a nucleotide sequence with deletion, substitution, insertion or addition of one or several nucleotides in SEQ ID NO: 446;
(29-33αA3-d) a protein comprising an amino acid sequence encoded by a nucleotide sequence having at least 70%, preferably at least 75%, at least 80%, at least 85%, at least 90%, at least 95%, at least 97%, at least 98%, or at least 99% identity to the nucleotide sequence of SEQ ID NO: 446;
(29-33αA3-e) a protein comprising an amino acid sequence encoded by a nucleic acid that hybridizes under stringent conditions with a nucleic acid having a nucleotide sequence complementary to the nucleotide sequence of SEQ ID NO: 446;
(29-33αB3) a protein comprising at least one amino acid sequence selected from the group consisting of SEQ ID NOs: 448-451, preferably a protein comprising at least 2, 3, or all sequences of the amino acid sequences. As referred to above, the amino acid sequence of any of SEQ ID NOs: 448 to 451 may be an amino acid sequence derived therefrom by deletion, substitution, insertion or addition of one or several amino acids.

[0746] The protein selected from the group consisting of the proteins as defined above in (29-33αA1-a) to (29-33αA1-e), (29-33αB1), (29-33αA2-a) to (29-33αA2-e), (29-33αB2), (29-33αA3-a) to (29-33αA3-e), and (29-33αB3) also include those proteins whose amino acid residues are modified by phosphorylation, sugar chain modification, aminoacylation, ring-opening, deamination or the like.

[0747] The protein selected from the group consisting of the proteins as defined above in (29-33αA1-a) to (29-33αA1-e), (29-33αB1), (29-33αA2-a) to (29-33αA2-e), (29-33αB2), (29-33αA3-a) to (29-33αA3-e), and (29-33αB3) can be proteins that are found in a protein spot with a molecular weight of around 10 to 70 kDa, preferably around 20 to 60 kDa, and an isoelectric point of 3.5 to 8.5, preferably 4.0 to 8.0 on gels used in the two-dimensional electrophoresis performed under the conditions described above in the subsection titled “Identification of antigens”.

[0748] Preferably, a protein that is an antigen in any of spots 29α to 33α has activity equivalent to that of the protein having the amino acid sequence of SEQ ID NO: 435 (glyceraldehyde-3-phosphate dehydrogenase isoform X1), the protein having the amino acid sequence of SEQ ID NO: 441 (glyceraldehyde-3-phosphate dehydrogenase, cytosolic), or the protein having the amino acid sequence of SEQ ID NO: 447 (uncharacterized protein LOC100782924) or causative of an allergy to soybean.

[0749] (34α) Antigen in Spot 34α

[0750] As the result of sequence identification of the antigen in spot 34α by mass spectroscopy, the following amino acid sequences were detected.

(SEQ ID NO: 454)

LFLEEIARDIQK

(SEQ ID NO: 457)

LFLEEIARDIQK

(SEQ ID NO: 458)

TTFDAVIHFAGLK

[0751] Also, the mass spectroscopic data obtained for spot 34α on a mass spectrometer was analyzed by comparing the data against the NCBI protein data, and as a result, bifunctional UDP-glucose 4-epimerase and UDP-xylose 4-epimerase 1-like (amino acid sequence: SEQ ID NO: 453, encoding nucleotide sequence: SEQ ID NO: 452) was identified as a protein comprising SEQ ID NO: 454 and uncharacterized protein LOC100803483 (amino acid sequence: SEQ ID NO: 456, encoding nucleotide sequence: SEQ ID NO: 455) was identified as a protein comprising SEQ ID NO: 457 or 458.

[0752] Accordingly, the antigen in spot 34α in the present invention can be any of proteins selected from the group consisting of the proteins as defined below in (34αA1-a) to (34αA1-e), (34αB1), (34αA2-a) to (34αA2-e), and (34αB2):

(34αA1-a) a protein comprising an amino acid sequence with deletion, substitution, insertion or addition of one or several amino acids in SEQ ID NO: 453;
(34αA1-b) a protein comprising an amino acid sequence having at least 70%, preferably at least 75%, at least 80%, at least 85%, at least 90%, at least 95%, at least 97%, at least 98%, or at least 99% identity to the amino acid sequence of SEQ ID NO: 453;
(34αA1-c) a protein comprising an amino acid sequence encoded by a nucleotide sequence with deletion, substitution, insertion or addition of one or several nucleotides in SEQ ID NO: 452;
(34αA1-d) a protein comprising an amino acid sequence encoded by a nucleotide sequence having at least 70%, preferably at least 75%, at least 80%, at least 85%, at least 90%, at least 95%, at least 97%, at least 98%, or at least 99% identity to the nucleotide sequence of SEQ ID NO: 452:
(34αA1-e) a protein comprising an amino acid sequence encoded by a nucleic acid that hybridizes under stringent conditions with a nucleic acid having a nucleotide sequence complementary to the nucleotide sequence of SEQ ID NO: 452;
(34αB1) a protein comprising an amino acid sequence of SEQ ID NOs: 454. As referred to above, the amino acid sequence of any of SEQ ID NOs: 464 may be an amino acid sequence derived therefrom by deletion, substitution, insertion or addition of one or several amino acids;
(34αA2-a) a protein comprising an amino acid sequence with deletion, substitution, insertion or addition of one or several amino acids in SEQ ID NO: 456;
(34αA2-b) a protein comprising an amino acid sequence having at least 70%, preferably at least 75%, at least 80%, at least 85%, at least 90%, at least 95%, at least 97%, at least 98%, or at least 99% identity to the amino acid sequence of SEQ ID NO: 456;
(34αA2-c) a protein comprising an amino acid sequence encoded by a nucleotide sequence with deletion, substitution, insertion or addition of one or several nucleotides in SEQ ID NO: 455;
(34αA2-d) a protein comprising an amino acid sequence encoded by a nucleotide sequence having at least 70%, preferably at least 75%, at least 80%, at least 85%, at least 90%, at least 95%, at least 97%, at least 98%, or at least 99% identity to the nucleotide sequence of SEQ ID NO: 455;
(34αA2-e) a protein comprising an amino acid sequence encoded by a nucleic acid that hybridizes under stringent conditions with a nucleic acid having a nucleotide sequence complementary to the nucleotide sequence of SEQ ID NO: 455;
(34αB2) a protein comprising at least one amino acid sequence selected from the group consisting of SEQ ID NOs: 457 and 458, preferably a protein comprising both the amino acid sequences. As referred to above, the amino acid sequence of any of SEQ ID NOs: 457, 458 may be an amino acid sequence derived therefrom by deletion, substitution, insertion or addition of one or several amino acids.

[0753] The protein selected from the group consisting of the proteins as defined above in (34αA1-a) to (34αA1-e), (34αB1), (34αA2-a) to (34αA2-e), and (34αB2) also include those proteins whose amino acid residues are modified by phosphorylation, sugar chain modification, aminoacylation, ring-opening, deamination or the like.

[0754] The protein selected from the group consisting of the proteins as defined above in (34αA1-a) to (34αA1-e), (34αB1), (34αA2-a) to (34αA2-e), and (34αB2) can be proteins that are found in a protein spot with a molecular weight of around 10 to 70 kDa, preferably around 20 to 60 kDa, and an isoelectric point of 5.5 to 10.5, preferably 6.0 to 10.0 on gels used in the two-dimensional electrophoresis performed under the conditions described above in the subsection titled “Identification of antigens”.

[0755] Preferably, a protein that is an antigen in spot 34α has activity equivalent to that of the protein having the amino acid sequence of SEQ ID NO: 453 (bifunctional UDP-glucose 4-epimerase and UDP-xylose 4-epimerase 1-like) or the protein having the amino acid sequence of SEQ ID NO: 456 (uncharacterized protein LOC100803483) or causative of an allergy to soybean.

[0756] (35α) Antigen in Spot 35α

[0757] As the result of sequence identification of the antigen in spot 35α by mass spectroscopy, the following amino acid sequences were detected.

(SEQ ID NO: 461)

ARYDEIVK

(SEQ ID NO: 462)

DGQTREHALLAFTLGVK

(SEQ ID NO: 463)

EVSSYLK

(SEQ ID NO: 464)

FSEILTK

(SEQ ID NO: 465)

STTTGHLIYK

(SEQ ID NO: 466)

THINIVVIGHVDSGK

(SEQ ID NO: 469)

DGQTREHALLAFTLGVK

(SEQ ID NO: 470)

EVSSYLK

(SEQ ID NO: 471)

STTTGHLIYK

(SEQ ID NO: 474)

ARYDEIVK

(SEQ ID NO: 475)

DGQTREHALLSFTLGVK

(SEQ ID NO: 476)

EVSSYLK

(SEQ ID NO: 477)

STTTGHLIYK

[0758] Also, the mass spectroscopic data obtained for spot 35α on a mass spectrometer was analyzed by comparing the data against the NCBI protein data, and as a result, elongation factor 1-alpha (amino acid sequence: SEQ ID NO: 460, encoding nucleotide sequence: SEQ ID NO: 459) was identified as a protein comprising any of SEQ ID NOs: 461 to 466, elongation factor 1-alpha (amino acid sequence: SEQ ID NO: 468, encoding nucleotide sequence: SEQ ID NO: 467) was identified as a protein comprising any of SEQ ID NOs: 469 to 471, and elongation factor-1A isoform X1 (amino acid sequence: SEQ ID NO: 473, encoding nucleotide sequence: SEQ ID NO: 472) was identified as a protein comprising any of SEQ ID NOs: 474 to 477.

[0759] Accordingly, the antigen in spot 35α in the present invention can be any of proteins selected from the group consisting of the proteins as defined below in (35αA1-a) to (35αA1-e), (35αB1), (35αA2-a) to (35αA2-e), (35αB2), (35αA3-a) to (35αA3-e), and (35αB3):

(35αA11-a) a protein comprising an amino acid sequence with deletion, substitution, insertion or addition of one or several amino acids in SEQ ID NO: 460;
(35αA1-b) a protein comprising an amino acid sequence having at least 70%, preferably at least 75%, at least 80%, at least 85%, at least 90%, at least 95%, at least 97%, at least 98%, or at least 99% identity to the amino acid sequence of SEQ ID NO: 460;
(35αA1-c) a protein comprising an amino acid sequence encoded by a nucleotide sequence with deletion, substitution, insertion or addition of one or several nucleotides in SEQ ID NO: 459;
(35αA1-d) a protein comprising an amino acid sequence encoded by a nucleotide sequence having at least 70%, preferably at least 75%, at least 80%, at least 85%, at least 90%, at least 95%, at least 97%, at least 98%, or at least 99% identity to the nucleotide sequence of SEQ ID NO: 459;
(35αA1-e) a protein comprising an amino acid sequence encoded by a nucleic acid that hybridizes under stringent conditions with a nucleic acid having a nucleotide sequence complementary to the nucleotide sequence of SEQ ID NO: 459;
(35αB1) a protein comprising at least one amino acid sequence selected from the group consisting of SEQ ID NOs: 461-466, preferably a protein comprising at least 2, 3, 4, or 5 or all sequences of the amino acid sequences. As referred to above, the amino acid sequence of any of SEQ ID NOs: 412 to 416 may be an amino acid sequence derived therefrom by deletion, substitution, insertion or addition of one or several amino acids;
(35αA2-a) a protein comprising an amino acid sequence with deletion, substitution, insertion or addition of one or several amino acids in SEQ ID NO: 468;
(35αA2-b) a protein comprising an amino acid sequence having at least 70%, preferably at least 75%, at least 80%, at least 85%, at least 90%, at least 95%, at least 97%, at least 98%, or at least 99% identity to the amino acid sequence of SEQ ID NO: 468;
(35αA2-c) a protein comprising an amino acid sequence encoded by a nucleotide sequence with deletion, substitution, insertion or addition of one or several nucleotides in SEQ ID NO: 467;
(35αA2-d) a protein comprising an amino acid sequence encoded by a nucleotide sequence having at least 70%, preferably at least 75%, at least 80%, at least 85%, at least 90%, at least 95%, at least 97%, at least 98%, or at least 99% identity to the nucleotide sequence of SEQ ID NO: 467;
(35αA2-e) a protein comprising an amino acid sequence encoded by a nucleic acid that hybridizes under stringent conditions with a nucleic acid having a nucleotide sequence complementary to the nucleotide sequence of SEQ ID NO: 467;
(35αB2) a protein comprising at least one amino acid sequence selected from the group consisting of SEQ ID NOs: 469-471, preferably a protein comprising at least 2, or all sequences of the amino acid sequences. As referred to above, the amino acid sequence of any of SEQ ID NOs: 469 to 471 may be an amino acid sequence derived therefrom by deletion, substitution, insertion or addition of one or several amino acids.
(35αA3-a) a protein comprising an amino acid sequence with deletion, substitution, insertion or addition of one or several amino acids in SEQ ID NO: 473;
(35αA3-b) a protein comprising an amino acid sequence having at least 70%, preferably at least 75%, at least 80%, at least 85%, at least 90%, at least 95%, at least 97%, at least 98%, or at least 99% identity to the amino acid sequence of SEQ ID NO: 473;
(35αA3-c) a protein comprising an amino acid sequence encoded by a nucleotide sequence with deletion, substitution, insertion or addition of one or several nucleotides in SEQ ID NO: 472;
(35αA3-d) a protein comprising an amino acid sequence encoded by a nucleotide sequence having at least 70%, preferably at least 75%, at least 80%, at least 85%, at least 90%, at least 95%, at least 97%, at least 98%, or at least 99% identity to the nucleotide sequence of SEQ ID NO: 472;
(35αA3-e) a protein comprising an amino acid sequence encoded by a nucleic acid that hybridizes under stringent conditions with a nucleic acid having a nucleotide sequence complementary to the nucleotide sequence of SEQ ID NO: 472;
(35αB3) a protein comprising at least one amino acid sequence selected from the group consisting of SEQ ID NOs: 474-477, preferably a protein comprising at least 2, 3, or all sequences of the amino acid sequences. As referred to above, the amino acid sequence of any of SEQ ID NOs: 474 to 477 may be an amino acid sequence derived therefrom by deletion, substitution, insertion or addition of one or several amino acids.

[0760] The protein selected from the group consisting of the proteins as defined above in (35αA1-a) to (35αA1-e), (35αB1), (35αA2-a) to (35αA2-e), (35αB2), (35αA3-a) to (35αA3-e), and (35αB3) also include those proteins whose amino acid residues are modified by phosphorylation, sugar chain modification, aminoacylation, ring-opening, deamination or the like.

[0761] The protein selected from the group consisting of the proteins as defined above in (35αA1-a) to (35αA1-e), (35αB1), (35αA2-a) to (35αA2-e), (35αB2), (35αA3-a) to (35αA3-e), and (35αB3) can be proteins that are found in a protein spot with a molecular weight of around 20 to 90 kDa, preferably around 30 to 80 kDa, and an isoelectric point of 5.5 to 10.5, preferably 6.0 to 10.0 on gels used in the two-dimensional electrophoresis performed under the conditions described above in the subsection titled “Identification of antigens”.

[0762] Preferably, a protein that is an antigen in spot 35α has activity equivalent to that of the protein having the amino acid sequence of SEQ ID NO: 460 or 468 (elongation factor 1-alpha) or the protein having the amino acid sequence of SEQ ID NO: 473 (elongation factor-1A isoform X1) or causative of an allergy to soybean.

[0763] (36α, 37α) Antigens in spots 36α, 37α

[0764] As the result of sequence identification of the antigens in spots 36α and 37α by mass spectroscopy, the following amino acid sequences were detected.

(SEQ ID NO: 480)

EGSSIINTTSVNAYK

(SEQ ID NO: 481)

FPPQQQQTQPGK

(SEQ ID NO: 482)

GAIVAYTRGLALQLVSK

(SEQ ID NO: 483)

LLDYTSTK

(SEQ ID NO: 486)

EGATVAFTYVK

(SEQ ID NO: 487)

QVIDLVVK

(SEQ ID NO: 490)

EGSSIINTTSVNAYK

(SEQ ID NO: 491)

FPPQQQQTQPGK

(SEQ ID NO: 492)

GAIVAYTRGLALQLVSK

(SEQ ID NO: 493)

LLDYTSTK

[0765] Also, the mass spectroscopic data obtained for spots 36α and 37α on a mass spectrometer was analyzed by comparing the data against the NCBI protein data, and as a result, seed maturation protein PM34 (amino acid sequence: SEQ ID NO: 479, encoding nucleotide sequence: SEQ ID NO: 478) was identified as a protein comprising any of SEQ ID NOs: 480 to 483, uncharacterized protein LOC100809384 (amino acid sequence: SEQ ID NO: 485, encoding nucleotide sequence: SEQ ID NO: 484) was identified as a protein comprising SEQ ID NO: 486 or 487, and hypothetical protein GLYMA_10G155300 (amino acid sequence: SEQ ID NO: 489, encoding nucleotide sequence: SEQ ID NO: 488) was identified as a protein comprising any of SEQ ID NOs: 4490 to 493.

[0766] Accordingly, the antigen in spot 36α, 37α in the present invention can be any of proteins selected from the group consisting of the proteins as defined below in (36, 37αA1-a) to (36, 37αA1-e), (36, 37αB1), (36, 37αA2-a) to (36, 37αA2-e), (36, 37αB2), (36, 37αA3-a) to (36, 37αA3-e), and (36, 37αB3):

(36, 37αA11-a) a protein comprising an amino acid sequence with deletion, substitution, insertion or addition of one or several amino acids in SEQ ID NO: 479;
(36, 37αA1-b) a protein comprising an amino acid sequence having at least 70%, preferably at least 75%, at least 80%, at least 85%, at least 90%, at least 95%, at least 97%, at least 98%, or at least 99% identity to the amino acid sequence of SEQ ID NO: 479;
(36, 37αA1-c) a protein comprising an amino acid sequence encoded by a nucleotide sequence with deletion, substitution, insertion or addition of one or several nucleotides in SEQ ID NO: 478;
(36, 37αA1-d) a protein comprising an amino acid sequence encoded by a nucleotide sequence having at least 70%, preferably at least 75%, at least 80%, at least 85%, at least 90%, at least 95%, at least 97%, at least 98%, or at least 99% identity to the nucleotide sequence of SEQ ID NO: 478;
(36, 37αA1-e) a protein comprising an amino acid sequence encoded by a nucleic acid that hybridizes under stringent conditions with a nucleic acid having a nucleotide sequence complementary to the nucleotide sequence of SEQ ID NO: 478;
(36, 37αB1) a protein comprising at least one amino acid sequence selected from the group consisting of SEQ ID NOs: 480-483, preferably a protein comprising at least 2, 3, or all sequences of the amino acid sequences. As referred to above, the amino acid sequence of any of SEQ ID NOs: 480 to 483 may be an amino acid sequence derived therefrom by deletion, substitution, insertion or addition of one or several amino acids;
(36, 37αA2-a) a protein comprising an amino acid sequence with deletion, substitution, insertion or addition of one or several amino acids in SEQ ID NO: 485;
(36, 37αA2-b) a protein comprising an amino acid sequence having at least 70%, preferably at least 75%, at least 80%, at least 85%, at least 90%, at least 95%, at least 97%, at least 98%, or at least 99% identity to the amino acid sequence of SEQ ID NO: 485;
(36, 37αA2-c) a protein comprising an amino acid sequence encoded by a nucleotide sequence with deletion, substitution, insertion or addition of one or several nucleotides in SEQ ID NO: 484;
(36, 37αA2-d) a protein comprising an amino acid sequence encoded by a nucleotide sequence having at least 70%, preferably at least 75%, at least 80%, at least 85%, at least 90%, at least 95%, at least 97%, at least 98%, or at least 99% identity to the nucleotide sequence of SEQ ID NO: 484;
(36, 37αA2-e) a protein comprising an amino acid sequence encoded by a nucleic acid that hybridizes under stringent conditions with a nucleic acid having a nucleotide sequence complementary to the nucleotide sequence of SEQ ID NO: 484;

[0767] (36, 37αB2) a protein comprising at least one amino acid sequence selected from the group consisting of SEQ ID NOs: 486 and 487, preferably a protein comprising both the amino acid sequences. As referred to above, the amino acid sequence of any of SEQ ID NOs: 486, 487 may be an amino acid sequence derived therefrom by deletion, substitution, insertion or addition of one or several amino acids.

(36, 37αA3-a) a protein comprising an amino acid sequence with deletion, substitution, insertion or addition of one or several amino acids in SEQ ID NO: 489;
(36, 37αA3-b) a protein comprising an amino acid sequence having at least 70%, preferably at least 75%, at least 80%, at least 85%, at least 90%, at least 95%, at least 97%, at least 98%, or at least 99% identity to the amino acid sequence of SEQ ID NO: 489;
(36, 37αA3-c) a protein comprising an amino acid sequence encoded by a nucleotide sequence with deletion, substitution, insertion or addition of one or several nucleotides in SEQ ID NO: 488;
(36, 37αA3-d) a protein comprising an amino acid sequence encoded by a nucleotide sequence having at least 70%, preferably at least 75%, at least 80%, at least 85%, at least 90%, at least 95%, at least 97%, at least 98%, or at least 99% identity to the nucleotide sequence of SEQ ID NO: 488;
(36, 37αA3-e) a protein comprising an amino acid sequence encoded by a nucleic acid that hybridizes under stringent conditions with a nucleic acid having a nucleotide sequence complementary to the nucleotide sequence of SEQ ID NO: 488;
(36, 37αB3) a protein comprising at least one amino acid sequence selected from the group consisting of SEQ ID NOs: 490-493, preferably a protein comprising at least 2, 3, or all sequences of the amino acid sequences. As referred to above, the amino acid sequence of any of SEQ ID NOs: 490 to 493 may be an amino acid sequence derived therefrom by deletion, substitution, insertion or addition of one or several amino acids.

[0768] The protein selected from the group consisting of the proteins as defined above in (36, 37αA1-a) to (36, 37αA1-e), (36, 37αB1), (36, 37αA2-a) to (36, 37αA2-e), (36, 37αB2), (36, 37αA3-a) to (36, 37αA3-e), and (36, 37αB3) also include those proteins whose amino acid residues are modified by phosphorylation, sugar chain modification, aminoacylation, ring-opening, deamination or the like.

[0769] The protein selected from the group consisting of the proteins as defined above in (36, 37αA1-a) to (36, 37αA1-e), (36, 37αB1), (36, 37αA2-a) to (36, 37αA2-e), (36, 37αB2), (36, 37αA3-a) to (36, 37αA3-e), and (36, 37αB3) can be proteins that are found in a protein spot with a molecular weight of around 10 to 70 kDa, preferably around 20 to 60 kDa, and an isoelectric point of 3.5 to 8.5, preferably 4.0 to 8.0 on gels used in the two-dimensional electrophoresis performed under the conditions described above in the subsection titled “Identification of antigens”.

[0770] Preferably, a protein that is an antigen in spot 36α or 37α has activity equivalent to that of the protein having the amino acid sequence of SEQ ID NO: 479 (seed maturation protein PM34), the protein having the amino acid sequence of SEQ ID NO: 485 (uncharacterized protein LOC100809384), or the protein having the amino acid sequence of SEQ ID NO: 489 (hypothetical protein GLYMA_10G155300) or causative of an allergy to soybean.

[0771] (38α) Antigen in Spot 38α

[0772] As the result of sequence identification of the antigen in spot 38α by mass spectroscopy, the following amino acid sequences were detected.

(SEQ ID NO: 496)

AAGSTTAQYVGEK

(SEQ ID NO: 497)

ALATGWSAAHYSTEITVEGTK

(SEQ ID NO: 498)

AQVAGSTTVQYAGEK

(SEQ ID NO: 499)

DTIGRVDNITTPLAK

(SEQ ID NO: 500)

DTIGSVDHITTPLAEK

(SEQ ID NO: 501)

ERELASDRARSGNIVK

(SEQ ID NO: 502)

ERYERANQATSEAAK

(SEQ ID NO: 503)

GGGEEQGRRREEIGEENK

(SEQ ID NO: 504)

GLAAAAAGENAK

(SEQ ID NO: 505)

GRVVIESEK

(SEQ ID NO: 506)

GVAEYAGQK

(SEQ ID NO: 507)

LGSAAHTLVK

(SEQ ID NO: 508)

QSSLEEIFK

(SEQ ID NO: 509)

QSSLEEISK

(SEQ ID NO: 510)

REQKPLGSIIGESFQGVQEK

(SEQ ID NO: 511)

TGNETQDIGQK

(SEQ ID NO: 512)

VIVAGEGEK

(SEQ ID NO: 513)

VQQHQGEGGGGVLNAIGETIAEIAETTK

[0773] Also, the mass spectroscopic data obtained for spot 38α on a mass spectrometer was analyzed by comparing the data against the NCBI protein data, and as a result, seed biotin-containing protein SBP65-like isoform X1 (amino acid sequence: SEQ ID NO: 495, encoding nucleotide sequence: SEQ ID NO: 494) was identified as a protein comprising any of SEQ ID NOs: 496 to 513.

[0774] Accordingly, the antigens in spot 38α in the present invention can be any protein selected from the group consisting of the proteins as defined below in (38αA-a) to (38αA-e) and (38αB):

(38αA-a) a protein comprising an amino acid sequence with deletion, substitution, insertion or addition of one or several amino acids in SEQ ID NO: 495;
(38αA-b) a protein comprising an amino acid sequence having at least 70%, preferably at least 75%, at least 80%, at least 85%, at least 90%, at least 95%, at least 97%, at least 98%, or at least 99% identity to the amino acid sequence of SEQ ID NO: 495;
(38αA-c) a protein comprising an amino acid sequence encoded by a nucleotide sequence with deletion, substitution, insertion or addition of one or several nucleotides in SEQ ID NO: 494;
(38αA-d) a protein comprising an amino acid sequence encoded by a nucleotide sequence having at least 70%, preferably at least 75%, at least 80%, at least 85%, at least 90%, at least 95%, at least 97%, at least 98%, or at least 99% identity to the nucleotide sequence of SEQ ID NO: 494;
(38αA-e) a protein comprising an amino acid sequence encoded by a nucleic acid that hybridizes under stringent conditions with a nucleic acid having a nucleotide sequence complementary to the nucleotide sequence of SEQ ID NO: 494;
(38αB) a protein comprising at least one amino acid sequence selected from the group consisting of SEQ ID NOs: 496-513, preferably a protein comprising at least 2, 3, 4, 5, 6, 7, 8, 9, 10, 11, 12, 13, 14, 15, 16 or 17 or all sequences of the amino acid sequences. As referred to above, the amino acid sequence of any of SEQ ID NOs: 496-513 may be an amino acid sequence derived therefrom by deletion, substitution, insertion or addition of one or several amino acids.

[0775] The proteins selected from the group consisting of (38αA-a) to (38αA-e) and (38αB) as defined above also include those proteins whose amino acid residues are modified by phosphorylation, sugar chain modification, aminoacylation, ring-opening, deamination or the like.

[0776] The proteins selected from the group consisting of (38αA-a) to (38αA-e) and (38αB) as defined above can be proteins that are found in a protein spot with a molecular weight of around 70 to 170 kDa, preferably around 80 to 160 kDa and an isoelectric point of 5.5 to 10.5, preferably 6.0 to 10.0 on gels used in the two-dimensional electrophoresis performed under the conditions described above in the subsection titled “Identification of antigens”.

[0777] Preferably, a protein that is an antigen in spot 38α has activity equivalent to that of the protein having the amino acid sequence of SEQ ID NO: 495 (seed biotin-containing protein SBP65-like isoform X1) or causative of an allergy to soybean.

[0778] (39α) Antigen in Spot 39α

[0779] As the result of sequence identification of the antigen in spot 39α by mass spectroscopy, the following amino acid sequences were detected.

(SEQ ID NO: 516)

ETLQEIIGSGAK

[0780] Also, the mass spectroscopic data obtained for spot 39α on a mass spectrometer was analyzed by comparing the data against the NCBI protein data, and as a result, ATP synthase subunit O, mitochondrial-like (amino acid sequence: SEQ ID NO: 515, encoding nucleotide sequence: SEQ ID NO: 514) was identified as a protein comprising SEQ ID NO: 516.

[0781] Accordingly, the antigens in spot 39α in the present invention can be any protein selected from the group consisting of the proteins as defined below in (39αA-a) to (39αA-e) and (39αB):

(39αA-a) a protein comprising an amino acid sequence with deletion, substitution, insertion or addition of one or several amino acids in SEQ ID NO: 515;
(39αA-b) a protein comprising an amino acid sequence having at least 70%, preferably at least 75%, at least 80%, at least 85%, at least 90%, at least 95%, at least 97%, at least 98%, or at least 99% identity to the amino acid sequence of SEQ ID NO: 515;
(39αA-c) a protein comprising an amino acid sequence encoded by a nucleotide sequence with deletion, substitution, insertion or addition of one or several nucleotides in SEQ ID NO: 514;
(39αA-d) a protein comprising an amino acid sequence encoded by a nucleotide sequence having at least 70%, preferably at least 75%, at least 80%, at least 85%, at least 90%, at least 95%, at least 97%, at least 98%, or at least 99% identity to the nucleotide sequence of SEQ ID NO: 514;
(39αA-e) a protein comprising an amino acid sequence encoded by a nucleic acid that hybridizes under stringent conditions with a nucleic acid having a nucleotide sequence complementary to the nucleotide sequence of SEQ ID NO: 514;
(39αB) a protein comprising an amino acid sequence of SEQ ID NO: 516. As referred to above, the amino acid sequence(s) of SEQ ID NO: 516 may be an amino acid sequence(s) derived therefrom by deletion, substitution, insertion or addition of one or several amino acids.

[0782] The proteins selected from the group consisting of (39αA-a) to (39αA-e) and (39αB) as defined above also include those proteins whose amino acid residues are modified by phosphorylation, sugar chain modification, aminoacylation, ring-opening, deamination or the like.

[0783] The proteins selected from the group consisting of (39αA-a) to (39αA-e) and (39αB) as defined above can be proteins that are found in a protein spot with a molecular weight of around 5 to 60 kDa, preferably around 10 to 50 kDa and an isoelectric point of 5.5 to 10.5, preferably 6.0 to 10.0 on gels used in the two-dimensional electrophoresis performed under the conditions described above in the subsection titled “Identification of antigens”.

[0784] Preferably, a protein that is an antigen in spot 39α has activity equivalent to that of the protein having the amino acid sequence of SEQ ID NO: 515 (ATP synthase subunit O, mitochondrial-like) or causative of an allergy to soybean.

[0785] (40α, 56α) Antigens in Spots 40α, 56α

[0786] As the result of sequence identification of the antigens in spots 40α and 56α by mass spectroscopy, the following amino acid sequences were detected.

(SEQ ID NO: 519)

EVGQDIQSK

(SEQ ID NO: 520)

RTTVTATTATA

[0787] Also, the mass spectroscopic data obtained for spots 40α and 56α on a mass spectrometer was analyzed by comparing the data against the NCBI protein data, and as a result, P24 oleosin isoform A (amino acid sequence: SEQ ID NO: 518, encoding nucleotide sequence: SEQ ID NO: 517) was identified as a protein comprising SEQ ID NO: 519 or 520.

[0788] Accordingly, the antigens in spot 40α, 56α in the present invention can be any protein selected from the group consisting of the proteins as defined below in (40, 56αA-a) to (40, 56αA-e) and (40, 56αB):

(40, 56αA-a) a protein comprising an amino acid sequence with deletion, substitution, insertion or addition of one or several amino acids in SEQ ID NO: 518:
(40, 56αA-b) a protein comprising an amino acid sequence having at least 70%, preferably at least 75%, at least 80%, at least 85%, at least 90%, at least 95%, at least 97%, at least 98%, or at least 99% identity to the amino acid sequence of SEQ ID NO: 518;
(40, 56αA-c) a protein comprising an amino acid sequence encoded by a nucleotide sequence with deletion, substitution, insertion or addition of one or several nucleotides in SEQ ID NO: 517;
(40, 56αA-d) a protein comprising an amino acid sequence encoded by a nucleotide sequence having at least 70%, preferably at least 75%, at least 80%, at least 85%, at least 90%, at least 95%, at least 97%, at least 98%, or at least 99% identity to the nucleotide sequence of SEQ ID NO: 517;
(40, 56αA-e) a protein comprising an amino acid sequence encoded by a nucleic acid that hybridizes under stringent conditions with a nucleic acid having a nucleotide sequence complementary to the nucleotide sequence of SEQ ID NO: 517;
(40, 56αB) a protein comprising at least one amino acid sequence selected from the group consisting of SEQ ID NOs: 519 and 520, preferably a protein comprising both the amino acid sequences. As referred to above, the amino acid sequence of any of SEQ ID NOs: 519 and 520 may be an amino acid sequence derived therefrom by deletion, substitution, insertion or addition of one or several amino acids.

[0789] The proteins selected from the group consisting of (40, 56αA-a) to (40, 56αA-e) and (40, 56αB) as defined above also include those proteins whose amino acid residues are modified by phosphorylation, sugar chain modification, aminoacylation, ring-opening, deamination or the like.

[0790] The proteins selected from the group consisting of (40, 56αA-a) to (40, 56αA-e) and (40, 56αB) as defined above can be proteins that are found in a protein spot with a molecular weight of around 5 to 60 kDa, preferably around 10 to 50 kDa and an isoelectric point of 5.5 to 10.5, preferably 6.0 to 10.0 on gels used in the two-dimensional electrophoresis performed under the conditions described above in the subsection titled “Identification of antigens”.

[0791] Preferably, a protein that is an antigen in spot 40α or 56α has activity equivalent to that of the protein having the amino acid sequence of SEQ ID NO: 518 (P24 oleosin isoform A) or causative of an allergy to soybean.

[0792] (41α) Antigen in Spot 41α

[0793] As the result of sequence identification of the antigen in spot 41α by mass spectroscopy, the following amino acid sequences were detected.

(SEQ ID NO: 523)

NAYGGSMK

[0794] Also, the mass spectroscopic data obtained for spot 41α on a mass spectrometer was analyzed by comparing the data against the NCBI protein data, and as a result, uncharacterized protein At3g49720-like isoform X2 (amino acid sequence: SEQ ID NO: 522, encoding nucleotide sequence: SEQ ID NO: 521) was identified as a protein comprising SEQ ID NO: 523.

[0795] Accordingly, the antigens in spot 41α in the present invention can be any protein selected from the group consisting of the proteins as defined below in (41αA-a) to (41αA-e) and (41αB):

(41αA-a) a protein comprising an amino acid sequence with deletion, substitution, insertion or addition of one or several amino acids in SEQ ID NO: 522;
(41αA-b) a protein comprising an amino acid sequence having at least 70%, preferably at least 75%, at least 80%, at least 85%, at least 90%, at least 95%, at least 97%, at least 98%, or at least 99% identity to the amino acid sequence of SEQ ID NO: 522;
(41αA-c) a protein comprising an amino acid sequence encoded by a nucleotide sequence with deletion, substitution, insertion or addition of one or several nucleotides in SEQ ID NO: 521;
(41αA-d) a protein comprising an amino acid sequence encoded by a nucleotide sequence having at least 70%, preferably at least 75%, at least 80%, at least 85%, at least 90%, at least 95%, at least 97%, at least 98%, or at least 99% identity to the nucleotide sequence of SEQ ID NO: 521:
(41αA-e) a protein comprising an amino acid sequence encoded by a nucleic acid that hybridizes under stringent conditions with a nucleic acid having a nucleotide sequence complementary to the nucleotide sequence of SEQ ID NO: 521;
(41αB) a protein comprising an amino acid sequence of SEQ ID NO: 523. As referred to above, the amino acid sequence of SEQ ID NO: 523 may be an amino acid sequence derived therefrom by deletion, substitution, insertion or addition of one or several amino acids.

[0796] The proteins selected from the group consisting of (41αA-a) to (41αA-e) and (41α B) as defined above also include those proteins whose amino acid residues are modified by phosphorylation, sugar chain modification, aminoacylation, ring-opening, deamination or the like.

[0797] The proteins selected from the group consisting of (41αA-a) to (41αA-e) and (41αB) as defined above can be proteins that are found in a protein spot with a molecular weight of around 5 to 60 kDa, preferably around 10 to 50 kDa and an isoelectric point of 5.5 to 10.5, preferably 6.0 to 10.0 on gels used in the two-dimensional electrophoresis performed under the conditions described above in the subsection titled “Identification of antigens”.

[0798] Preferably, a protein that is an antigen in spot 41α has activity equivalent to that of the protein having the amino acid sequence of SEQ ID NO: 515 (ATP synthase subunit O, mitochondrial-like) or causative of an allergy to soybean.

[0799] (42α, 43α) Antigen in Spots 42α, 43α

[0800] As the result of sequence identification of the antigens in spots 42α and 43α by mass spectroscopy, the following amino acid sequences were detected.

(SEQ ID NO: 526)

ALEQLQDAIAK

(SEQ ID NO: 527)

HHQTYITNYNK

(SEQ ID NO: 528)

NLAPVREGGGEPPK

(SEQ ID NO: 529)

NVRPDYLK

(SEQ ID NO: 530)

RLVVETTANQDPLVTK

(SEQ ID NO: 531)

YASEVYEK

(SEQ ID NO: 534)

ALEQLQDAVAK

(SEQ ID NO: 535)

HHQTYITNFNK

(SEQ ID NO: 536)

NLAPVREGGGEPPK

(SEQ ID NO: 537)

NVRPDYLK

(SEQ ID NO: 538)

RLVVETTANQDPLVTK

(SEQ ID NO: 539)

YASEVYEK

[0801] Also, the mass spectroscopic data obtained for spots 42α and 43α on a mass spectrometer was analyzed by comparing the data against the NCBI protein data, and as a result, superoxide dismutase [Mn], mitochondrial (amino acid sequence: SEQ ID NO: 525, encoding nucleotide sequence: SEQ ID NO: 524) was identified as a protein comprising any of SEQ ID NOs: 526 to 531 and hypothetical protein GLYMA_04G221300 (amino acid sequence: SEQ ID NO: 533, encoding nucleotide sequence: SEQ ID NO: 532) was identified as a protein comprising any of SEQ ID NOs: 534 to 539.

[0802] Accordingly, the antigen in spot 42α, 43α in the present invention can be any of proteins selected from the group consisting of the proteins as defined below in (42, 43αA1-a) to (42, 43αA1-e), (42, 43αB1), (42, 43αA2-a) to (42, 43αA2-e), and (42, 43αB2):

(42, 43αA1-a) a protein comprising an amino acid sequence with deletion, substitution, insertion or addition of one or several amino acids in SEQ ID NO: 525;
(42, 43αA1-b) a protein comprising an amino acid sequence having at least 70%, preferably at least 75%, at least 80%, at least 85%, at least 90%, at least 95%, at least 97%, at least 98%, or at least 99% identity to the amino acid sequence of SEQ ID NO: 525;
(42, 43αA1-c) a protein comprising an amino acid sequence encoded by a nucleotide sequence with deletion, substitution, insertion or addition of one or several nucleotides in SEQ ID NO: 524;
(42, 43αA1-d) a protein comprising an amino acid sequence encoded by a nucleotide sequence having at least 70%, preferably at least 75%, at least 80%, at least 85%, at least 90%, at least 95%, at least 97%, at least 98%, or at least 99% identity to the nucleotide sequence of SEQ ID NO: 524;
(42, 43αA1-e) a protein comprising an amino acid sequence encoded by a nucleic acid that hybridizes under stringent conditions with a nucleic acid having a nucleotide sequence complementary to the nucleotide sequence of SEQ ID NO: 524;
(42, 43αB1) a protein comprising at least one amino acid sequence selected from the group consisting of SEQ ID NOs: 526-531, preferably a protein comprising at least 2, 3, 4, or 5 or all sequences of the amino acid sequences. As referred to above, the amino acid sequence of any of SEQ ID NOs: 526 to 531 may be an amino acid sequence derived therefrom by deletion, substitution, insertion or addition of one or several amino acids;
(42, 43αA2-a) a protein comprising an amino acid sequence with deletion, substitution, insertion or addition of one or several amino acids in SEQ ID NO: 533;
(42, 43αA2-b) a protein comprising an amino acid sequence having at least 70%, preferably at least 75%, at least 80%, at least 85%, at least 90%, at least 95%, at least 97%, at least 98%, or at least 99% identity to the amino acid sequence of SEQ ID NO: 533;
(42, 43αA2-c) a protein comprising an amino acid sequence encoded by a nucleotide sequence with deletion, substitution, insertion or addition of one or several nucleotides in SEQ ID NO: 532;
(42, 43αA2-d) a protein comprising an amino acid sequence encoded by a nucleotide sequence having at least 70%, preferably at least 75%, at least 80%, at least 85%, at least 90%, at least 95%, at least 97%, at least 98%, or at least 99% identity to the nucleotide sequence of SEQ ID NO: 532;
(42, 43αA2-e) a protein comprising an amino acid sequence encoded by a nucleic acid that hybridizes under stringent conditions with a nucleic acid having a nucleotide sequence complementary to the nucleotide sequence of SEQ ID NO: 532;
(42, 43αB2) a protein comprising at least one amino acid sequence selected from the group consisting of SEQ ID NOs: 534-539, preferably a protein comprising at least 2, 3, 4, or 5 or all sequences of the amino acid sequences. As referred to above, the amino acid sequence of any of SEQ ID NOs: 534 to 539 may be an amino acid sequence derived therefrom by deletion, substitution, insertion or addition of one or several amino acids.

[0803] The protein selected from the group consisting of the proteins as defined above in (42, 43αA1-a) to (42, 43αA1-e), (42, 43αB1), (42, 43αA2-a) to (42, 43αA2-e), and (42, 43αB2) also include those proteins whose amino acid residues are modified by phosphorylation, sugar chain modification, aminoacylation, ring-opening, deamination or the like.

[0804] The protein selected from the group consisting of the proteins as defined above in (42, 43αA1-a) to (42, 43αA1-e), (42, 43αB1), (42, 43αA2-a) to (42, 43αA2-e), and (42, 43αB2) can be proteins that are found in a protein spot with a molecular weight of around 5 to 60 kDa, preferably around 10 to 50 kDa, and an isoelectric point of 5.5 to 10.5, preferably 6.0 to 10.0 on gels used in the two-dimensional electrophoresis performed under the conditions described above in the subsection titled “Identification of antigens”.

[0805] Preferably, a protein that is an antigen in spot 42α or 43α has activity equivalent to that of the protein having the amino acid sequence of SEQ ID NO: 525 (superoxide dismutase [Mn], mitochondrial) or the protein having the amino acid sequence of SEQ ID NO: 533 (hypothetical protein GLYMA_04G221300) or causative of an allergy to soybean.

[0806] (45α) Antigen in Spot 45α

[0807] As the result of sequence identification of the antigen in spot 45α by mass spectroscopy, the following amino acid sequences were detected.

(SEQ ID NO: 542)

HVPGFIERAEELK

(SEQ ID NO: 543)

RFALLVEDLK

(SEQ ID NO: 544)

VANVESGGEFTISSAEEIIK

(SEQ ID NO: 545)

YTNALGLELDLTDK

(SEQ ID NO: 548)

HVPGFIERAEELK

(SEQ ID NO: 549)

RFALLVEDLK

(SEQ ID NO: 550)

VANVESGGEFTISSAEEIIK

(SEQ ID NO: 551)

YTNALGLELDLTDK

[0808] Also, the mass spectroscopic data obtained for spot 45α on a mass spectrometer was analyzed by comparing the data against the NCBI protein data, and as a result, uncharacterized protein LOC100499771 (amino acid sequence: SEQ ID NO: 541, encoding nucleotide sequence: SEQ ID NO: 540) was identified as a protein comprising any of SEQ ID NOs: 542 to 545 and hypothetical protein GLYMA_09G192800 (amino acid sequence: SEQ ID NO: 547, encoding nucleotide sequence: SEQ ID NO: 546) was identified as a protein comprising any of SEQ ID NOs: 548 to 551.

[0809] Accordingly, the antigen in spot 45α in the present invention can be any of proteins selected from the group consisting of the proteins as defined below in (45αA1-a) to (45αA1-e), (45αB1), (45αA2-a) to (45αA2e), and (45αB2):

(45αA11-a) a protein comprising an amino acid sequence with deletion, substitution, insertion or addition of one or several amino acids in SEQ ID NO: 541;
(45αA11-b) a protein comprising an amino acid sequence having at least 70%, preferably at least 75%, at least 80%, at least 85%, at least 90%, at least 95%, at least 97%, at least 98%, or at least 99% identity to the amino acid sequence of SEQ ID NO: 541;
(45αA1-c) a protein comprising an amino acid sequence encoded by a nucleotide sequence with deletion, substitution, insertion or addition of one or several nucleotides in SEQ ID NO: 540;
(45αA1-d) a protein comprising an amino acid sequence encoded by a nucleotide sequence having at least 70%, preferably at least 75%, at least 80%, at least 85%, at least 90%, at least 95%, at least 97%, at least 98%, or at least 99% identity to the nucleotide sequence of SEQ ID NO: 540;
(45αA1-e) a protein comprising an amino acid sequence encoded by a nucleic acid that hybridizes under stringent conditions with a nucleic acid having a nucleotide sequence complementary to the nucleotide sequence of SEQ ID NO: 540;
(45αB1) a protein comprising at least one amino acid sequence selected from the group consisting of SEQ ID NOs: 542-545, preferably a protein comprising at least 2, 3, or all sequences of the amino acid sequences. As referred to above, the amino acid sequence of any of SEQ ID NOs: 542 to 545 may be an amino acid sequence derived therefrom by deletion, substitution, insertion or addition of one or several amino acids;
(45αA2-a) a protein comprising an amino acid sequence with deletion, substitution, insertion or addition of one or several amino acids in SEQ ID NO: 547;
(45αA2-b) a protein comprising an amino acid sequence having at least 70%, preferably at least 75%, at least 80%, at least 85%, at least 90%, at least 95%, at least 97%, at least 98%, or at least 99% identity to the amino acid sequence of SEQ ID NO: 547;
(45αA2-c) a protein comprising an amino acid sequence encoded by a nucleotide sequence with deletion, substitution, insertion or addition of one or several nucleotides in SEQ ID NO: 546;
(45αA2-d) a protein comprising an amino acid sequence encoded by a nucleotide sequence having at least 70%, preferably at least 75%, at least 80%, at least 85%, at least 90%, at least 95%, at least 97%, at least 98%, or at least 99% identity to the nucleotide sequence of SEQ ID NO: 546;
(45αA2-e) a protein comprising an amino acid sequence encoded by a nucleic acid that hybridizes under stringent conditions with a nucleic acid having a nucleotide sequence complementary to the nucleotide sequence of SEQ ID NO: 546;
(45αB2) a protein comprising at least one amino acid sequence selected from the group consisting of SEQ ID NOs: 548-551, preferably a protein comprising at least 2, 3, or all sequences of the amino acid sequences. As referred to above, the amino acid sequence of any of SEQ ID NOs: 548 to 551 may be an amino acid sequence derived therefrom by deletion, substitution, insertion or addition of one or several amino acids.

[0810] The protein selected from the group consisting of the proteins as defined above in (45αA1-a) to (45αA1-e), (45αB1), (45αA2-a) to (45αA2-e), and (45αB2) also include those proteins whose amino acid residues are modified by phosphorylation, sugar chain modification, aminoacylation, ring-opening, deamination or the like.

[0811] The protein selected from the group consisting of the proteins as defined above in (45αA1-a) to (45αA1-e), (45αB1), (45αA2-a) to (45αA2-e), and (45αB2) can be proteins that are found in a protein spot with a molecular weight of around 2 to 50 kDa, preferably around 5 to 40 kDa, and an isoelectric point of 3.5 to 7.5, preferably 4.0 to 7.0 on gels used in the two-dimensional electrophoresis performed under the conditions described above in the subsection titled “Identification of antigens”.

[0812] Preferably, a protein that is an antigen in spot 45α has activity equivalent to that of the protein having the amino acid sequence of SEQ ID NO: 541 (uncharacterized protein LOC100499771) or the protein having the amino acid sequence of SEQ ID NO: 547 (hypothetical protein GLYMA_09G192800) or causative of an allergy to soybean.

[0813] (46α) Antigen in Spot 46α

[0814] As the result of sequence identification of the antigen in spot 46α by mass spectroscopy, the following amino acid sequences were detected.

(SEQ ID NO: 554)

DNVEYLAK

[0815] Also, the mass spectroscopic data obtained for spot 46α on a mass spectrometer was analyzed by comparing the data against the NCBI protein data, and as a result, seed maturation protein PM22 (amino acid sequence: SEQ ID NO: 553, encoding nucleotide sequence: SEQ ID NO: 552) was identified as a protein comprising SEQ ID NO: 554.

[0816] Accordingly, the antigens in spot 46α in the present invention can be any protein selected from the group consisting of the proteins as defined below in (46αA-a) to (46αA-e) and (46αB):

(46αA-a) a protein comprising an amino acid sequence with deletion, substitution, insertion or addition of one or several amino acids in SEQ ID NO: 553;
(46αA-b) a protein comprising an amino acid sequence having at least 70%, preferably at least 75%, at least 80%, at least 85%, at least 90%, at least 95%, at least 97%, at least 98%, or at least 99% identity to the amino acid sequence of SEQ ID NO: 553;
(46αA-c) a protein comprising an amino acid sequence encoded by a nucleotide sequence with deletion, substitution, insertion or addition of one or several nucleotides in SEQ ID NO: 552;
(46αA-d) a protein comprising an amino acid sequence encoded by a nucleotide sequence having at least 70%, preferably at least 75%, at least 80%, at least 85%, at least 90%, at least 95%, at least 97%, at least 98%, or at least 99% identity to the nucleotide sequence of SEQ ID NO: 552:
(46αA-e) a protein comprising an amino acid sequence encoded by a nucleic acid that hybridizes under stringent conditions with a nucleic acid having a nucleotide sequence complementary to the nucleotide sequence of SEQ ID NO: 552;
(46αB) a protein comprising an amino acid sequence of SEQ ID NO: 554. As referred to above, the amino acid sequence(s) of SEQ ID NO: 554 may be an amino acid sequence(s) derived therefrom by deletion, substitution, insertion or addition of one or several amino acids.

[0817] The proteins selected from the group consisting of (46αA-a) to (46αA-e) and (46αB) as defined above also include those proteins whose amino acid residues are modified by phosphorylation, sugar chain modification, aminoacylation, ring-opening, deamination or the like.

[0818] The proteins selected from the group consisting of (46αA-a) to (46αA-e) and (46αB) as defined above can be proteins that are found in a protein spot with a molecular weight of around 2 to 50 kDa, preferably around 5 to 40 kDa and an isoelectric point of 3.5 to 7.5, preferably 4.0 to 7.0 on gels used in the two-dimensional electrophoresis performed under the conditions described above in the subsection titled “Identification of antigens”.

[0819] Preferably, a protein that is an antigen in spot 46α has activity equivalent to that of the protein having the amino acid sequence of SEQ ID NO: 553 (seed maturation protein PM22) or causative of an allergy to soybean.

[0820] (47α) Antigen in Spot 47α

[0821] As the result of sequence identification of the antigen in spot 47α by mass spectroscopy, the following amino acid sequences were detected.

(SEQ ID NO: 557)

LPTDESLLTQIK

(SEQ ID NO: 558)

NGYIVIK

(SEQ ID NO: 561)

NGYIVIK

(SEQ ID NO: 562)

TYPQQAGTIRK

(SEQ ID NO: 563)

VVEVSTSK

[0822] Also, the mass spectroscopic data obtained for spot 47α on a mass spectrometer was analyzed by comparing the data against the NCBI protein data, and as a result, eukaryotic translation initiation factor 5A-2 (amino acid sequence: SEQ ID NO: 556, encoding nucleotide sequence: SEQ ID NO: 555) was identified as a protein comprising SEQ ID NO: 557 or 558 and uncharacterized protein LOC100305510 (amino acid sequence: SEQ ID NO: 560, encoding nucleotide sequence: SEQ ID NO: 559) was identified as a protein comprising any of SEQ ID NOs: 561 to 563.

[0823] Accordingly, the antigen in spot 47α in the present invention can be any of proteins selected from the group consisting of the proteins as defined below in (47αA1-a) to (47αA1-e), (47αB1), (47αA2-a) to (47αA2-e), and (47αB2):

(47αA1-a) a protein comprising an amino acid sequence with deletion, substitution, insertion or addition of one or several amino acids in SEQ ID NO: 556;
(47αA1-b) a protein comprising an amino acid sequence having at least 70%, preferably at least 75%, at least 80%, at least 85%, at least 90%, at least 95%, at least 97%, at least 98%, or at least 99% identity to the amino acid sequence of SEQ ID NO: 556;
(47αA1-c) a protein comprising an amino acid sequence encoded by a nucleotide sequence with deletion, substitution, insertion or addition of one or several nucleotides in SEQ ID NO: 555;
(47αA1-d) a protein comprising an amino acid sequence encoded by a nucleotide sequence having at least 70%, preferably at least 75%, at least 80%, at least 85%, at least 90%, at least 95%, at least 97%, at least 98%, or at least 99% identity to the nucleotide sequence of SEQ ID NO: 555;
(47αA1-e) a protein comprising an amino acid sequence encoded by a nucleic acid that hybridizes under stringent conditions with a nucleic acid having a nucleotide sequence complementary to the nucleotide sequence of SEQ ID NO: 555;
(47αB1) a protein comprising at least one amino acid sequence selected from the group consisting of SEQ ID NOs: 557 and 558, preferably a protein comprising both the amino acid sequences. As referred to above, the amino acid sequence of any of SEQ ID NOs: 557, 558 may be an amino acid sequence derived therefrom by deletion, substitution, insertion or addition of one or several amino acids;
(47αA2-a) a protein comprising an amino acid sequence with deletion, substitution, insertion or addition of one or several amino acids in SEQ ID NO: 560;
(47αA2-b) a protein comprising an amino acid sequence having at least 70%, preferably at least 75%, at least 80%, at least 85%, at least 90%, at least 95%, at least 97%, at least 98%, or at least 99% identity to the amino acid sequence of SEQ ID NO: 560;
(47αA2-c) a protein comprising an amino acid sequence encoded by a nucleotide sequence with deletion, substitution, insertion or addition of one or several nucleotides in SEQ ID NO: 559;
(47αA2-d) a protein comprising an amino acid sequence encoded by a nucleotide sequence having at least 70%, preferably at least 75%, at least 80%, at least 85%, at least 90%, at least 95%, at least 97%, at least 98%, or at least 99% identity to the nucleotide sequence of SEQ ID NO: 559;
(47αA2-e) a protein comprising an amino acid sequence encoded by a nucleic acid that hybridizes under stringent conditions with a nucleic acid having a nucleotide sequence complementary to the nucleotide sequence of SEQ ID NO: 559;
(47αB2) a protein comprising at least one amino acid sequence selected from the group consisting of SEQ ID NOs: 561-563, preferably a protein comprising at least 2, or all sequences of the amino acid sequences. As referred to above, the amino acid sequence of any of SEQ ID NOs: 548 to 551 may be an amino acid sequence derived therefrom by deletion, substitution, insertion or addition of one or several amino acids.

[0824] The protein selected from the group consisting of the proteins as defined above in (47αA1-a) to (47αA1-e), (47αB1), (47αA2-a) to (47αA2-e), and (47αB2) also include those proteins whose amino acid residues are modified by phosphorylation, sugar chain modification, aminoacylation, ring-opening, deamination or the like.

[0825] The protein selected from the group consisting of the proteins as defined above in (47αA1-a) to (47αA1-e), (47αB1), (47αA2-a) to (47αA2-e), and (47αB2) can be proteins that are found in a protein spot with a molecular weight of around 2 to 50 kDa, preferably around 5 to 40 kDa, and an isoelectric point of 3.5 to 7.5, preferably 4.0 to 7.0 on gels used in the two-dimensional electrophoresis performed under the conditions described above in the subsection titled “Identification of antigens”.

[0826] Preferably, a protein that is an antigen in spot 47α has activity equivalent to that of the protein having the amino acid sequence of SEQ ID NO: 556 (eukaryotic translation initiation factor 5A-2) or the protein having the amino acid sequence of SEQ ID NO: 560 (uncharacterized protein LOC100305510) or causative of an allergy to soybean.

[0827] (48α) Antigen in Spot 48α

[0828] As the result of sequence identification of the antigen in spot 48α by mass spectroscopy, the following amino acid sequences were detected.

(SEQ ID NO: 566)

AEFPIFDK

(SEQ ID NO: 567)

DARGNNVNLADYK

(SEQ ID NO: 568)

DGNVVDRYAPTTSPLSIEK

(SEQ ID NO: 569)

GGLFGDSIK

(SEQ ID NO: 570)

VDVNGDNAAPLYK

[0829] Also, the mass spectroscopic data obtained for spot 48α on a mass spectrometer was analyzed by comparing the data against the NCBI protein data, and as a result, uncharacterized protein LOC100306570 (amino acid sequence: SEQ ID NO: 565, encoding nucleotide sequence: SEQ ID NO: 564) was identified as a protein comprising any of SEQ ID NOs: 566 to 570.

[0830] Accordingly, the antigens in spot 48α in the present invention can be any protein selected from the group consisting of the proteins as defined below in (48αA-a) to (48αA-e) and (48αB):

(48αA-a) a protein comprising an amino acid sequence with deletion, substitution, insertion or addition of one or several amino acids in SEQ ID NO: 565;
(48αA-b) a protein comprising an amino acid sequence having at least 70%, preferably at least 75%, at least 80%, at least 85%, at least 90%, at least 95%, at least 97%, at least 98%, or at least 99% identity to the amino acid sequence of SEQ ID NO: 565;
(48αA-c) a protein comprising an amino acid sequence encoded by a nucleotide sequence with deletion, substitution, insertion or addition of one or several nucleotides in SEQ ID NO: 564;
(48αA-d) a protein comprising an amino acid sequence encoded by a nucleotide sequence having at least 70%, preferably at least 75%, at least 80%, at least 85%, at least 90%, at least 95%, at least 97%, at least 98%, or at least 99% identity to the nucleotide sequence of SEQ ID NO: 564;
(48αA-e) a protein comprising an amino acid sequence encoded by a nucleic acid that hybridizes under stringent conditions with a nucleic acid having a nucleotide sequence complementary to the nucleotide sequence of SEQ ID NO: 564;
(48αB) a protein comprising at least one amino acid sequence selected from the group consisting of SEQ ID NOs: 566-570, preferably a protein comprising at least 2, 3 or 4 or all sequences of the amino acid sequences. As referred to above, the amino acid sequence of any of SEQ ID NOs: 566-570 may be an amino acid sequence derived therefrom by deletion, substitution, insertion or addition of one or several amino acids.

[0831] The proteins selected from the group consisting of (48αA-a) to (48αA-e) and (48αB) as defined above also include those proteins whose amino acid residues are modified by phosphorylation, sugar chain modification, aminoacylation, ring-opening, deamination or the like.

[0832] The proteins selected from the group consisting of (48αA-a) to (48αA-e) and (48αB) as defined above can be proteins that are found in a protein spot with a molecular weight of around 2 to 50 kDa, preferably around 5 to 40 kDa and an isoelectric point of 3.5 to 8.5, preferably 4.0 to 8.0 on gels used in the two-dimensional electrophoresis performed under the conditions described above in the subsection titled “Identification of antigens”.

[0833] Preferably, a protein that is an antigen in spot 48α has activity equivalent to that of the protein having the amino acid sequence of SEQ ID NO: 565 (uncharacterized protein LOC100306570) or causative of an allergy to soybean.

[0834] (50α) Antigen in Spot 50α

[0835] As the result of sequence identification of the antigen in spot 50α by mass spectroscopy, the following amino acid sequences were detected.

(SEQ ID NO: 573)

AADYLHNYQGDNTTAPSQPAESK

(SEQ ID NO: 574)

LVAEAAQSALK

(SEQ ID NO: 575)

QGIGQYVDK

(SEQ ID NO: 576)

VADAAGDLLDAAGK

[0836] Also, the mass spectroscopic data obtained for spot 50α on a mass spectrometer was analyzed by comparing the data against the NCBI protein data, and as a result, uncharacterized protein LOC100813859 (amino acid sequence: SEQ ID NO: 572, encoding nucleotide sequence: SEQ ID NO: 571) was identified as a protein comprising any of SEQ ID NOs: 573 to 576.

[0837] Accordingly, the antigens in spot 50α in the present invention can be any protein selected from the group consisting of the proteins as defined below in (50αA-a) to (50αA-e) and (50αB):

(50αA-a) a protein comprising an amino acid sequence with deletion, substitution, insertion or addition of one or several amino acids in SEQ ID NO: 572;
(50αA-b) a protein comprising an amino acid sequence having at least 70%, preferably at least 75%, at least 80%, at least 85%, at least 90%, at least 95%, at least 97%, at least 98%, or at least 99% identity to the amino acid sequence of SEQ ID NO: 572;
(50αA-c) a protein comprising an amino acid sequence encoded by a nucleotide sequence with deletion, substitution, insertion or addition of one or several nucleotides in SEQ ID NO: 571;
(50αA-d) a protein comprising an amino acid sequence encoded by a nucleotide sequence having at least 70%, preferably at least 75%, at least 80%, at least 85%, at least 90%, at least 95%, at least 97%, at least 98%, or at least 99% identity to the nucleotide sequence of SEQ ID NO: 571:
(50αA-e) a protein comprising an amino acid sequence encoded by a nucleic acid that hybridizes under stringent conditions with a nucleic acid having a nucleotide sequence complementary to the nucleotide sequence of SEQ ID NO: 571;
(50αB) a protein comprising at least one amino acid sequence selected from the group consisting of SEQ ID NOs: 573-576, preferably a protein comprising at least 2 or 3 or all sequences of the amino acid sequences. As referred to above, the amino acid sequence of any of SEQ ID NOs: 573-576 may be an amino acid sequence derived therefrom by deletion, substitution, insertion or addition of one or several amino acids.

[0838] The proteins selected from the group consisting of (50αA-a) to (50αA-e) and (50αB) as defined above also include those proteins whose amino acid residues are modified by phosphorylation, sugar chain modification, aminoacylation, ring-opening, deamination or the like.

[0839] The proteins selected from the group consisting of (50αA-a) to (50αA-e) and (50αB) as defined above can be proteins that are found in a protein spot with a molecular weight of around 2 to 50 kDa, preferably around 5 to 40 kDa and an isoelectric point of 2.5 to 6.5, preferably 3.0 to 6.0 on gels used in the two-dimensional electrophoresis performed under the conditions described above in the subsection titled “Identification of antigens”.

[0840] Preferably, a protein that is an antigen in spot 50α has activity equivalent to that of the protein having the amino acid sequence of SEQ ID NO: 572 (uncharacterized protein LOC100813859) or causative of an allergy to soybean.

### (51α) Antigen in Spot 51α

[0841] As the result of sequence identification of the antigen in spot 51α by mass spectroscopy, the following amino acid sequences were detected.

(SEQ ID NO: 579)

EAAESTLSAYK

(SEQ ID NO: 580)

LLDSRLIPSASSGDSK

(SEQ ID NO: 581)

QAFDEAIAELDTLGEESYK

(SEQ ID NO: 582)

VSAAADNEELTVEERNLLSVAYK

[0842] Also, the mass spectroscopic data obtained for spot 51α on a mass spectrometer was analyzed by comparing the data against the NCBI protein data, and as a result, 14-3-3-like protein (amino acid sequence: SEQ ID NO: 578, encoding nucleotide sequence: SEQ ID NO: 577) was identified as a protein comprising any of SEQ ID NOs: 579 to 582.

[0843] Accordingly, the antigens in spot 51α in the present invention can be any protein selected from the group consisting of the proteins as defined below in (51αA-a) to (51αA-e) and (51αB):

(51αA-a) a protein comprising an amino acid sequence with deletion, substitution, insertion or addition of one or several amino acids in SEQ ID NO: 578;
(51αA-b) a protein comprising an amino acid sequence having at least 70%, preferably at least 75%, at least 80%, at least 85%, at least 90%, at least 95%, at least 97%, at least 98%, or at least 99% identity to the amino acid sequence of SEQ ID NO: 578;
(51αA-c) a protein comprising an amino acid sequence encoded by a nucleotide sequence with deletion, substitution, insertion or addition of one or several nucleotides in SEQ ID NO: 577;
(51αA-d) a protein comprising an amino acid sequence encoded by a nucleotide sequence having at least 70%, preferably at least 75%, at least 80%, at least 85%, at least 90%, at least 95%, at least 97%, at least 98%, or at least 99% identity to the nucleotide sequence of SEQ ID NO: 577;
(51αA-e) a protein comprising an amino acid sequence encoded by a nucleic acid that hybridizes under stringent conditions with a nucleic acid having a nucleotide sequence complementary to the nucleotide sequence of SEQ ID NO: 577;
(51αB) a protein comprising at least one amino acid sequence selected from the group consisting of SEQ ID NOs: 579-582, preferably a protein comprising at least 2 or 3 or all sequences of the amino acid sequences. As referred to above, the amino acid sequence of any of SEQ ID NOs: 579-582 may be an amino acid sequence derived therefrom by deletion, substitution, insertion or addition of one or several amino acids.

[0844] The proteins selected from the group consisting of (51αA-a) to (51αA-e) and (51αB) as defined above also include those proteins whose amino acid residues are modified by phosphorylation, sugar chain modification, aminoacylation, ring-opening, deamination or the like.

[0845] The proteins selected from the group consisting of (51αA-a) to (51αA-e) and (51αB) as defined above can be proteins that are found in a protein spot with a molecular weight of around 5 to 60 kDa, preferably around 10 to 50 kDa and an isoelectric point of 2.5 to 6.5, preferably 3.0 to 6.0 on gels used in the two-dimensional electrophoresis performed under the conditions described above in the subsection titled “Identification of antigens”.

[0846] Preferably, a protein that is an antigen in spot 51α has activity equivalent to that of the protein having the amino acid sequence of SEQ ID NO: 578 (14-3-3-like protein) or causative of an allergy to soybean.

[0847] (52α) Antigen in Spot 52α

[0848] As the result of sequence identification of the antigen in spot 52α by mass spectroscopy, the following amino acid sequences were detected.

(SEQ ID NO: 585)

APGGAPANVAIAVSRLGGK

(SEQ ID NO: 586)

GSVDAFHVNTVDTTGAGDSFVGALLAK

(SEQ ID NO: 587)

IVDDQSILEDEPRLREVLK

(SEQ ID NO: 588)

VSDAELEFLTGSDK

[0849] Also, the mass spectroscopic data obtained for spot 52α on a mass spectrometer was analyzed by comparing the data against the NCBI protein data, and as a result, probable fructokinase-4 (amino acid sequence: SEQ ID NO: 584, encoding nucleotide sequence: SEQ ID NO: 583) was identified as a protein comprising any of SEQ ID NOs: 585 to 588.

[0850] Accordingly, the antigens in spot 52α in the present invention can be any protein selected from the group consisting of the proteins as defined below in (52αA-a) to (52αA-e) and (52αB):

(52αA-a) a protein comprising an amino acid sequence with deletion, substitution, insertion or addition of one or several amino acids in SEQ ID NO: 584;
(52αA-b) a protein comprising an amino acid sequence having at least 70%, preferably at least 75%, at least 80%, at least 85%, at least 90%, at least 95%, at least 97%, at least 98%, or at least 99% identity to the amino acid sequence of SEQ ID NO: 584;
(52αA-c) a protein comprising an amino acid sequence encoded by a nucleotide sequence with deletion, substitution, insertion or addition of one or several nucleotides in SEQ ID NO: 583;
(52αA-d) a protein comprising an amino acid sequence encoded by a nucleotide sequence having at least 70%, preferably at least 75%, at least 80%, at least 85%, at least 90%, at least 95%, at least 97%, at least 98%, or at least 99% identity to the nucleotide sequence of SEQ ID NO: 583;
(52αA-e) a protein comprising an amino acid sequence encoded by a nucleic acid that hybridizes under stringent conditions with a nucleic acid having a nucleotide sequence complementary to the nucleotide sequence of SEQ ID NO: 583;
(52αB) a protein comprising at least one amino acid sequence selected from the group consisting of SEQ ID NOs: 585-588, preferably a protein comprising at least 2 or 3 or all sequences of the amino acid sequences. As referred to above, the amino acid sequence of any of SEQ ID NOs: 585-588 may be an amino acid sequence derived therefrom by deletion, substitution, insertion or addition of one or several amino acids.

[0851] The proteins selected from the group consisting of (52αA-a) to (52αA-e) and (52αB) as defined above also include those proteins whose amino acid residues are modified by phosphorylation, sugar chain modification, aminoacylation, ring-opening, deamination or the like.

[0852] The proteins selected from the group consisting of (52αA-a) to (52αA-e) and (52αB) as defined above can be proteins that are found in a protein spot with a molecular weight of around 5 to 60 kDa, preferably around 10 to 50 kDa and an isoelectric point of 3.5 to 7.5, preferably 4.0 to 7.0 on gels used in the two-dimensional electrophoresis performed under the conditions described above in the subsection titled “Identification of antigens”.

[0853] Preferably, a protein that is an antigen in spot 52α has activity equivalent to that of the protein having the amino acid sequence of SEQ ID NO: 584 (probable fructokinase-4) or causative of an allergy to soybean.

[0854] (53α) Antigen in Spot 53α

[0855] As the result of sequence identification of the antigen in spot 53α by mass spectroscopy, the following amino acid sequences were detected.

(SEQ ID NO: 591)

AEFVDIINAATVK

(SEQ ID NO: 592)

ELAAQPDVDGFLVGGASLK

(SEQ ID NO: 593)

FFVGGNWK

(SEQ ID NO: 594)

IVTTLNEAK

(SEQ ID NO: 595)

VATPAQAQEVHADLRK

(SEQ ID NO: 596)

VAYALQQGLK

(SEQ ID NO: 597)

VPGEDVVEVVVSPPFVFLPFVK

(SEQ ID NO: 600)

ELAAQPDVDGFLVGGASLKPEFVDIINAATVK

(SEQ ID NO: 601)

FFVGGNWK

(SEQ ID NO: 602)

IVTTLNEAK

(SEQ ID NO: 603)

VATPAQAQEVHADLRK

(SEQ ID NO: 604)

VAYALQQGLK

[0856] Also, the mass spectroscopic data obtained for spot 53α on a mass spectrometer was analyzed by comparing the data against the NCBI protein data, and as a result, triosephosphate isomerase isoform X1 (amino acid sequence: SEQ ID NO: 590, encoding nucleotide sequence: SEQ ID NO: 589) was identified as a protein comprising any of SEQ ID NOs: 591 to 597 and triosephosphate isomerase, cytosolic (amino acid sequence: SEQ ID NO: 599, encoding nucleotide sequence: SEQ ID NO: 598) was identified as a protein comprising any of SEQ ID NOs: 600 to 604.

[0857] Accordingly, the antigen in spot 53α in the present invention can be any of proteins selected from the group consisting of the proteins as defined below in (53αA1-a) to (53αA1-e), (53αB1), (53αA2-a) to (53αA2-e), and (53αB2):

(53αA1-a) a protein comprising an amino acid sequence with deletion, substitution, insertion or addition of one or several amino acids in SEQ ID NO: 590;
(53αA1-b) a protein comprising an amino acid sequence having at least 70%, preferably at least 75%, at least 80%, at least 85%, at least 90%, at least 95%, at least 97%, at least 98%, or at least 99% identity to the amino acid sequence of SEQ ID NO: 590;
(53αA1-c) a protein comprising an amino acid sequence encoded by a nucleotide sequence with deletion, substitution, insertion or addition of one or several nucleotides in SEQ ID NO: 589;
(53αA1-d) a protein comprising an amino acid sequence encoded by a nucleotide sequence having at least 70%, preferably at least 75%, at least 80%, at least 85%, at least 90%, at least 95%, at least 97%, at least 98%, or at least 99% identity to the nucleotide sequence of SEQ ID NO: 589;
(53αA1-e) a protein comprising an amino acid sequence encoded by a nucleic acid that hybridizes under stringent conditions with a nucleic acid having a nucleotide sequence complementary to the nucleotide sequence of SEQ ID NO: 589;
(53αB1) a protein comprising at least one amino acid sequence selected from the group consisting of SEQ ID NOs: 591-597, preferably a protein comprising at least 2, 3, 4, 5, or 6 or all sequences of the amino acid sequences. As referred to above, the amino acid sequence of any of SEQ ID NOs: 591 to 597 may be an amino acid sequence derived therefrom by deletion, substitution, insertion or addition of one or several amino acids;
(53αA2-a) a protein comprising an amino acid sequence with deletion, substitution, insertion or addition of one or several amino acids in SEQ ID NO: 599;
(53αA2-b) a protein comprising an amino acid sequence having at least 70%, preferably at least 75%, at least 80%, at least 85%, at least 90%, at least 95%, at least 97%, at least 98%, or at least 99% identity to the amino acid sequence of SEQ ID NO: 599;
(53αA2-c) a protein comprising an amino acid sequence encoded by a nucleotide sequence with deletion, substitution, insertion or addition of one or several nucleotides in SEQ ID NO: 598;
(53αA2-d) a protein comprising an amino acid sequence encoded by a nucleotide sequence having at least 70%, preferably at least 75%, at least 80%, at least 85%, at least 90%, at least 95%, at least 97%, at least 98%, or at least 99% identity to the nucleotide sequence of SEQ ID NO: 598;
(53αA2-e) a protein comprising an amino acid sequence encoded by a nucleic acid that hybridizes under stringent conditions with a nucleic acid having a nucleotide sequence complementary to the nucleotide sequence of SEQ ID NO: 598;
(53αB2) a protein comprising at least one amino acid sequence selected from the group consisting of SEQ ID NOs: 600-604, preferably a protein comprising at least 2, 3, or 4 or all sequences of the amino acid sequences. As referred to above, the amino acid sequence of any of SEQ ID NOs: 600 to 604 may be an amino acid sequence derived therefrom by deletion, substitution, insertion or addition of one or several amino acids.

[0858] The protein selected from the group consisting of the proteins as defined above in (53αA1-a) to (53αA1-e), (53αB1), (53αA2-a) to (53αA2-e), and (53αB2) also include those proteins whose amino acid residues are modified by phosphorylation, sugar chain modification, aminoacylation, ring-opening, deamination or the like.

[0859] The protein selected from the group consisting of the proteins as defined above in (53αA1-a) to (53αA1-e), (53αB1), (53αA2-a) to (53αA2-e), and (53αB2) can be proteins that are found in a protein spot with a molecular weight of around 5 to 60 kDa, preferably around 10 to 50 kDa, and an isoelectric point of 3.5 to 8.5, preferably 4.0 to 8.0 on gels used in the two-dimensional electrophoresis performed under the conditions described above in the subsection titled “Identification of antigens”.

[0860] Preferably, a protein that is an antigen in spot 53α has activity equivalent to that of the protein having the amino acid sequence of SEQ ID NO: 590 (triosephosphate isomerase isoform X1) or the protein having the amino acid sequence of SEQ ID NO: 599 (triosephosphate isomerase, cytosolic) or causative of an allergy to soybean.

[0861] (54α) Antigen in Spot 54α

[0862] As the result of sequence identification of the antigen in spot 54α by mass spectroscopy, the following amino acid sequences were detected.

(SEQ ID NO: 607)

FDGENVANPPSPDEDNK

(SEQ ID NO: 608)

LVSWDAVSSRLEQAK

(SEQ ID NO: 609)

QVVGTELDGK

(SEQ ID NO: 610)

SLEEIIVTSYNK

(SEQ ID NO: 611)

TYVENLK

(SEQ ID NO: 614)

QIVGTELDGK

(SEQ ID NO: 615)

SLEEIIVTSYNK

(SEQ ID NO: 616)

TYVENLK

[0863] Also, the mass spectroscopic data obtained for spot 54α on a mass spectrometer was analyzed by comparing the data against the NCBI protein data, and as a result, superoxide dismutase [Fe], chloroplastic isoform X1 (amino acid sequence: SEQ ID NO: 606, encoding nucleotide sequence: SEQ ID NO: 605) as a protein comprising any of SEQ ID NOs: 607 to 611 and iron-superoxide dismutase (amino acid sequence: SEQ ID NO: 613, encoding nucleotide sequence: SEQ ID NO: 612) was identified as a protein comprising any of SEQ ID NOs: 614 to 616.

[0864] Accordingly, the antigen in spot 54α in the present invention can be any of proteins selected from the group consisting of the proteins as defined below in (54αA1-a) to (54αA1-e), (54αB1), (54αA2-a) to (54αA2-e), and (54αB2):

(54αA1-a) a protein comprising an amino acid sequence with deletion, substitution, insertion or addition of one or several amino acids in SEQ ID NO: 606;
(54αA1-b) a protein comprising an amino acid sequence having at least 70%, preferably at least 75%, at least 80%, at least 85%, at least 90%, at least 95%, at least 97%, at least 98%, or at least 99% identity to the amino acid sequence of SEQ ID NO: 606;
(54αA1-c) a protein comprising an amino acid sequence encoded by a nucleotide sequence with deletion, substitution, insertion or addition of one or several nucleotides in SEQ ID NO: 605;
(54αA1-d) a protein comprising an amino acid sequence encoded by a nucleotide sequence having at least 70%, preferably at least 75%, at least 80%, at least 85%, at least 90%, at least 95%, at least 97%, at least 98%, or at least 99% identity to the nucleotide sequence of SEQ ID NO: 605:
(54αA1-e) a protein comprising an amino acid sequence encoded by a nucleic acid that hybridizes under stringent conditions with a nucleic acid having a nucleotide sequence complementary to the nucleotide sequence of SEQ ID NO: 605;
(54αB1) a protein comprising at least one amino acid sequence selected from the group consisting of SEQ ID NOs: 607-611, preferably a protein comprising at least 2, 3, or 4 or all sequences of the amino acid sequences. As referred to above, the amino acid sequence of any of SEQ ID NOs: 591 to 597 may be an amino acid sequence derived therefrom by deletion, substitution, insertion or addition of one or several amino acids;
(54αA2-a) a protein comprising an amino acid sequence with deletion, substitution, insertion or addition of one or several amino acids in SEQ ID NO: 613;
(54αA2-b) a protein comprising an amino acid sequence having at least 70%, preferably at least 75%, at least 80%, at least 85%, at least 90%, at least 95%, at least 97%, at least 98%, or at least 99% identity to the amino acid sequence of SEQ ID NO: 613;
(54αA2-c) a protein comprising an amino acid sequence encoded by a nucleotide sequence with deletion, substitution, insertion or addition of one or several nucleotides in SEQ ID NO: 612;
(54αA2-d) a protein comprising an amino acid sequence encoded by a nucleotide sequence having at least 70%, preferably at least 75%, at least 80%, at least 85%, at least 90%, at least 95%, at least 97%, at least 98%, or at least 99% identity to the nucleotide sequence of SEQ ID NO: 612:
(54αA2-e) a protein comprising an amino acid sequence encoded by a nucleic acid that hybridizes under stringent conditions with a nucleic acid having a nucleotide sequence complementary to the nucleotide sequence of SEQ ID NO: 612;
(54αB2) a protein comprising at least one amino acid sequence selected from the group consisting of SEQ ID NOs: 614-616, preferably a protein comprising at least 2, or all sequences of the amino acid sequences. As referred to above, the amino acid sequence of any of SEQ ID NOs: 614 to 616 may be an amino acid sequence derived therefrom by deletion, substitution, insertion or addition of one or several amino acids.

[0865] The protein selected from the group consisting of the proteins as defined above in (54αA1-a) to (54αA11-e), (54αB1), (54αA2-a) to (54αA2-e), and (54αB2) also include those proteins whose amino acid residues are modified by phosphorylation, sugar chain modification, aminoacylation, ring-opening, deamination or the like.

[0866] The protein selected from the group consisting of the proteins as defined above in (54αA1-a) to (54αA1-e), (54αB1), (54αA2-a) to (54αA2-e), and (54αB2) can be proteins that are found in a protein spot with a molecular weight of around 5 to 60 kDa, preferably around 10 to 50 kDa, and an isoelectric point of 3.5 to 8.5, preferably 4.0 to 8.0 on gels used in the two-dimensional electrophoresis performed under the conditions described above in the subsection titled “Identification of antigens”.

[0867] Preferably, a protein that is an antigen in spot 54α has activity equivalent to that of the protein having the amino acid sequence of SEQ ID NO: 606 (superoxide dismutase [Fe], chloroplastic isoform X1) or the protein having the amino acid sequence of SEQ ID NO: 613 (iron-superoxide dismutase) or causative of an allergy to soybean.

[0868] (55α) Antigen in Spot 55α

[0869] As the result of sequence identification of the antigen in spot 55α by mass spectroscopy, the following amino acid sequences were detected.

(SEQ ID NO: 619)

DYAGDAAQNVK

(SEQ ID NO: 620)

DYASDAAQK

(SEQ ID NO: 621)

DYASDATDAAK

(SEQ ID NO: 622)

DYASDAVQK

(SEQ ID NO: 623)

DYASDTAQRTK

(SEQ ID NO: 624)

DYASDTAQTSK

(SEQ ID NO: 625)

DYASEASDVAQNTK

(SEQ ID NO: 626)

DYATDAAQK

(SEQ ID NO: 627)

DYVGDAAQRSK

(SEQ ID NO: 628)

EASDYASETAK

(SEQ ID NO: 629)

EYAGDVALNAK

(SEQ ID NO: 630)

EYVGDAAQK

(SEQ ID NO: 631)

GAAEYASDAAQRTK

(SEQ ID NO: 632)

GYVGDAAQK

(SEQ ID NO: 633)

LQDIASEAGQYSAEK

(SEQ ID NO: 634)

LSEGLGFK

(SEQ ID NO: 635)

VSDYATDTAQK

(SEQ ID NO: 638)

DYAGDAVQNIK

(SEQ ID NO: 639)

DYASDAAQRTK

(SEQ ID NO: 640)

DYASDATDAAK

(SEQ ID NO: 641)

DYASDTAQRTK

(SEQ ID NO: 642)

DYVGDAAQK

(SEQ ID NO: 643)

EASDYASETAQK

(SEQ ID NO: 644)

EASEYASDAAQRTK

(SEQ ID NO: 645)

EYAGDVAQNAK

(SEQ ID NO: 646)

GYVGDAAQK

(SEQ ID NO: 647)

LQDIASEAGQYSTEK

(SEQ ID NO: 648)

LTEGLGFK

(SEQ ID NO: 649)

VSDYAGDAAQK

[0870] Also, the mass spectroscopic data obtained for spot 55α on a mass spectrometer was analyzed by comparing the data against the NCBI protein data, and as a result, 51 kDa seed maturation protein precursor (amino acid sequence: SEQ ID NO: 618, encoding nucleotide sequence: SEQ ID NO: 617) was identified as a protein comprising any of SEQ ID NOs: 619 to 635 and Lea protein precursor (amino acid sequence: SEQ ID NO: 637, encoding nucleotide sequence: SEQ ID NO: 636) was identified as a protein comprising any of SEQ ID NOs: 638 to 649.

[0871] Accordingly, the antigen in spot 55α in the present invention can be any of proteins selected from the group consisting of the proteins as defined below in (55αA1-a) to (55αA1-e), (55αB1), (55αA2-a) to (55αA2-e), and (55αB2):

(55αA1-a) a protein comprising an amino acid sequence with deletion, substitution, insertion or addition of one or several amino acids in SEQ ID NO: 618;
(55αA1-b) a protein comprising an amino acid sequence having at least 70%, preferably at least 75%, at least 80%, at least 85%, at least 90%, at least 95%, at least 97%, at least 98%, or at least 99% identity to the amino acid sequence of SEQ ID NO: 618;
(55αA1-c) a protein comprising an amino acid sequence encoded by a nucleotide sequence with deletion, substitution, insertion or addition of one or several nucleotides in SEQ ID NO: 617;
(55αA1-d) a protein comprising an amino acid sequence encoded by a nucleotide sequence having at least 70%, preferably at least 75%, at least 80%, at least 85%, at least 90%, at least 95%, at least 97%, at least 98%, or at least 99% identity to the nucleotide sequence of SEQ ID NO: 617;
(55αA1-e) a protein comprising an amino acid sequence encoded by a nucleic acid that hybridizes under stringent conditions with a nucleic acid having a nucleotide sequence complementary to the nucleotide sequence of SEQ ID NO: 617;
(55αB1) a protein comprising at least one amino acid sequence selected from the group consisting of SEQ ID NOs: 619-635, preferably a protein comprising at least 2, 3, 4, 5, 6, 7, 8, 9, 10, 11, 12, 13, 14, 15, or 16 or all sequences of the amino acid sequences. As referred to above, the amino acid sequence of any of SEQ ID NOs: 619 to 635 may be an amino acid sequence derived therefrom by deletion, substitution, insertion or addition of one or several amino acids;
(55αA2-a) a protein comprising an amino acid sequence with deletion, substitution, insertion or addition of one or several amino acids in SEQ ID NO: 637;
(55αA2-b) a protein comprising an amino acid sequence having at least 70%, preferably at least 75%, at least 80%, at least 85%, at least 90%, at least 95%, at least 97%, at least 98%, or at least 99% identity to the amino acid sequence of SEQ ID NO: 637;
(55αA2-c) a protein comprising an amino acid sequence encoded by a nucleotide sequence with deletion, substitution, insertion or addition of one or several nucleotides in SEQ ID NO: 636;
(55αA2-d) a protein comprising an amino acid sequence encoded by a nucleotide sequence having at least 70%, preferably at least 75%, at least 80%, at least 85%, at least 90%, at least 95%, at least 97%, at least 98%, or at least 99% identity to the nucleotide sequence of SEQ ID NO: 636;
(55αA2-e) a protein comprising an amino acid sequence encoded by a nucleic acid that hybridizes under stringent conditions with a nucleic acid having a nucleotide sequence complementary to the nucleotide sequence of SEQ ID NO: 636;
(55αB2) a protein comprising at least one amino acid sequence selected from the group consisting of SEQ ID NOs: 638-649, preferably a protein comprising at least 2, 3, 4, 5, 6, 7, 8, 9, 10, or 11 or all sequences of the amino acid sequences. As referred to above, the amino acid sequence of any of SEQ ID NOs: 638 to 649 may be an amino acid sequence derived therefrom by deletion, substitution, insertion or addition of one or several amino acids.

[0872] The protein selected from the group consisting of the proteins as defined above in (55αA1-a) to (55αA1-e), (55αB1), (55αA2-a) to (55αA2-e), and (55αB2) also include those proteins whose amino acid residues are modified by phosphorylation, sugar chain modification, aminoacylation, ring-opening, deamination or the like.

[0873] The protein selected from the group consisting of the proteins as defined above in (55αA1-a) to (55αA1-e), (55αB1), (55αA2-a) to (55αA2-e), and (55αB2) can be proteins that are found in a protein spot with a molecular weight of around 30 to 90 kDa, preferably around 40 to 80 kDa, and an isoelectric point of 5.5 to 10.5, preferably 6.0 to 10.0 on gels used in the two-dimensional electrophoresis performed under the conditions described above in the subsection titled “Identification of antigens”.

[0874] Preferably, a protein that is an antigen in spot 55α has activity equivalent to that of the protein having the amino acid sequence of SEQ ID NO: 618 (51 kDa seed maturation protein precursor) or the protein having the amino acid sequence of SEQ ID NO: 637 (Lea protein precursor) or causative of an allergy to soybean.

[0875] By stating herein “deletion, substitution, insertion or addition of one or several amino acids” in relation to amino acid sequence, it is meant that in an amino acid sequence of interest, one or several amino acids (e.g., 30%, preferably 25%, 20%, 15%, 10%, 5%, 3%, 2%, or 1% of amino acids with respect to the total length of the amino acid sequence) are deleted, one or several amino acids are substituted by any other amino acids, any other amino acids are inserted, and/or any other amino acids are added.

[0876] Among the aforementioned modifications, substitution is preferably conservative substitution. The “conservative substitution” refers to the substitution of a certain amino acid residue by a different amino acid residue having similar physicochemical characteristics, and can be any type of substitution as long as it does not substantially change the characteristics of the structure of the original sequence for example, any type of substitution is acceptable as long as any substituted amino acids do not disrupt the helical structure of the original sequence or other secondary structures that characterize the original sequence. The following gives examples of separate groups of amino acid residues that are conservatively substitutable with each other, but substitutable amino acid residues are not limited to the examples given below.

Group A: leucine, isoleucine, valine, alanine, methionine
Group B: aspartic acid, glutamic acid
Group C: asparagine, glutamine
Group D: lysine, arginine
Group E: serine, threonine
Group F: phenylalanine, tyrosine

[0877] In the case of non-conservative substitution, one member belonging to one of the aforementioned groups can be replaced with a member belong to any other group. For example, in order to eliminate the possibility of unwanted sugar-chain modification, amino acids of group B, D or E as listed above may be substituted by those of any other group. Also, cysteines may be deleted or substituted by any other amino acids to prevent them from being folded into a protein in its tertiary structure. Also, in order to maintain the balance between hydrophilicity and hydrophobicity or to increase hydrophilicity for the purpose of facilitating synthesis, any amino acids may be substituted in consideration of the hydropathy scales of amino acids, which are a measure of the hydrophilic and hydrophobic properties of amino acids (J. Kyte and R. Doolittle, J. Mol. Biol., Vol. 157, p. 105-132, 1982).

[0878] As referred to herein, the percent identity between two amino acid sequences can be determined by visual inspection and mathematical calculation. Alternatively, the percent identity can be determined using a computer program. Examples of such computer programs include BLAST FASTA (Altschul, et al., J. Mol. Biol., 215: 403-410 (1990)), and ClustalW. In particular, various conditions (parameters) for identity searches with the BLAST program are described in Altschul, et al. (Nucl. Acids. Res., 25, p. 3389-3402, 1997), and are publicly available on the websites of the National Center for Biotechnology Information (NCBI) and DNA Data Bank of Japan (DDBJ) (Altschul, et al., BLAST Handbook, Altschul, et al., NCB/NLM/NIH Bethesda, Md. 20894). Also, the percent identity can be determined using a genetic information processing software program, such as GENETYX Ver.7 (Genetyx Corporation), DINASIS Pro (Hitachi Software Engineering Co., Ltd.), or Vector NTI (Infomax Inc.).

[0879] By stating herein “deletion, substitution, insertion or addition of one or several nucleotides” in relation to nucleotide sequence, it is meant that in a nucleotide sequence of interest, one or several nucleotides (e.g., 30%, preferably 25%, 20%, 15%, 10%, 5%, 3%, 2% or 1%, of amino acids with respect to the total length of the nucleotide sequence) are deleted, one or several nucleotides are substituted by any other nucleotides, any other nucleotides are inserted, and/or any other nucleotides are added. It is preferable that such a nucleotide deletion, substitution, insertion or addition should not give rise to a frame shift in an amino acid coding sequence.

[0880] As referred to herein, the percent identity between two nucleotide sequences can be determined by visual inspection and mathematical calculation. Alternatively, the percent identity can be determined using a computer program. Examples of such sequence comparison computer programs include the BLASTN program, version 2.2.7, available on the website of the National Library of Medicine (http://www.ncbi.nlm.nih.gov/blast/b12seq/bls.html) (Altschul, et al. (1990) J. Mol. Biol., 215: 403-10), or the WU-BLAST 2.0 algorithm. Standard default parameter settings for WU-BLAST 2.0 are found and available on the following website: http://blast.wust1.edu.

[0881] As referred to herein, “under stringent conditions” means that hybridization takes place under moderately or highly stringent conditions. To be specific, the moderately stringent conditions can be easily determined by those having ordinary skill in the art on the basis of, for example, the length of DNA. Basic conditions are described in Sambrook, et al., Molecular Cloning: A Laboratory Manual, 3rd ed., ch. 6-7, Cold Spring Harbor Laboratory Press, 2001. The moderately stringent conditions include hybridization under the conditions of preferably 1×SSC to 6×SSC at 42° C. to 55° C., more preferably 1×SSC to 3×SSC at 45° C. to 50° C., most preferably 2×SSC at 50° C. In the case of using a hybridization solution containing, for example, about 50% formamide, a temperature around 5 to 15° C. lower than the foregoing should be adopted. Washing is also carried out under the conditions of 0.5×SSC to 6×SSC at 40° C. to 60° C. In the process of hybridization and washing, generally 0.05% to 0.2% SDS, preferably about 0.1% SDS, may be added. Likewise, the highly stringent conditions can be easily determined by those having ordinary skill in the art on the basis of, for example, the length of DNA. Generally, the highly stringent (high stringent) conditions include hybridization and/or washing at a higher temperature and/or a lower salt concentration than those adopted under the moderately stringent conditions. For example, hybridization is carried out under the conditions of 0.1×SSC to 2×SSC at 55° C. to 65° C., more preferably 0.1×SSC to 1×SSC at 60° C. to 65° C., most preferably 0.2×SSC at 63° C. Washing is carried out under the conditions of 0.2×SSC to 2×SSC at 50° C. to 68° C., more preferably 0.2×SSC at 60 to 65° C.

[0882] Antigens may be obtained by separating and purifying them from soybean using a combination of protein purification methods well known to those skilled in the art. Also, antigens may be obtained by expressing them as recombinant proteins using a genetic recombination technique well known to those skilled in the art and by separating and purifying them using protein purification methods well known to those skilled in the art.

[0883] Exemplary protein purification methods include: solubility-based purification methods such as salt precipitation and solvent precipitation; purification methods based on molecular weight difference, such as dialysis, ultrafiltration, gel filtration and SDS-PAGE; charge-based purification methods such as ion exchange chromatography and hydroxylapatite chromatography; specific affinity-based purification methods such as affinity chromatography; purification methods based on hydrophobicity difference, such as reverse-phase high-performance liquid chromatography; and purification methods based on isoelectric point difference, such as isoelectric focusing.

[0884] Preparation of a protein by a genetic recombination technique is carried out by preparing an expression vector comprising an antigen-encoding nucleic acid, introducing the expression vector into appropriate host cells by gene transfer or genetic transformation, culturing the host cells under suitable conditions for expression of a recombinant protein, and recovering the recombinant protein expressed in the host cells.

[0885] The “vector” refers to a nucleic acid that can be used to introduce a nucleic acid attached thereto into host cells. The “expression vector” is a vector that can induce the expression of a protein encoded by a nucleic acid introduced therethrough. Exemplary vectors include plasmid vectors and viral vectors. Those skilled in the art can select an appropriate expression vector for the expression of a recombinant protein depending on the type of host cells to be used.

[0886] The “host cells” refers to cells that undergo gene transfer or genetic transformation by a vector. The host cells can be appropriately selected by those skilled in the art depending on the type of the vector to be used. The host cells can be derived from prokaryotes such as E. coli. When prokaryotic cells like E coli. are used as host cells, the antigen of the present invention may be designed to contain an N-terminal methionine residue in order to facilitate the expression of a recombinant protein in the prokaryotic cells. The N-terminal methionine can be cleaved from the recombinant protein after expression. Also, the host cells may be cells derived from eukaryotes, such as single-cell eukaryotes like yeast, plant cells and animal cells (e.g., human cells, monkey cells, hamster cells, rat cells, murine cells or insect cells) or silkworm.

[0887] Gene transfer or genetic transformation of an expression vector into host cells can be carried out as appropriate by following a technique known to those skilled in the art. Those skilled in the art can make possible the expression of a recombinant protein by selecting suitable conditions for the expression of the recombinant protein as appropriate depending on the type of host cells and culturing the host cells under the selected conditions. Then, those skilled in the art can homogenize the host cells having the expressed recombinant protein, and separate and purify an antigen expressed as the recombinant protein from the resulting homogenate by using an appropriate combination of such protein purification methods as mentioned above.

[0888] Diagnosis Kit and Method

[0889] The present invention provides a method for providing an indicator for diagnosing an allergy to a soybean in a subject, the method comprising the steps of:

(i) contacting a sample obtained from the subject with an antigen, wherein the sample is a solution comprising an Ig antibody;
(ii) detecting binding between an IgE antibody present in the sample from the subject and the antigen; and
(iii) when the binding between the IgE antibody in the subject and the antigen is detected, an indicator of the fact that the subject is allergic to a soybean is provided; wherein the antigen is at least one of proteins as defined above in any of (1) to (8) and (1α) to (55α).

[0890] The sample obtained from a subject is a solution containing an Ig antibody, preferably an IgE antibody, as collected from the subject. Examples of such solutions include blood, saliva, sputum, snivel, urine, sweat, and tear. The sample obtained from the subject may be subjected to pretreatment for increasing the concentration of an Ig antibody in the sample before being contacted with an antigen. The pretreatment of a sample may involve, for example, collection of the serum from the blood. In a particularly preferred mode, the step (i) mentioned above is carried out by contacting an IgE antibody present in the serum obtained from a subject with an antigen.

[0891] Detection of contact and binding between the sample obtained from a subject and an antigen can be carried out by using a known method. Examples of such methods that can be used include detection by ELISA (Enzyme-Linked Immunosorbent Assay), sandwich immunoassay, immunoblotting, or immunoprecipitation. These are all techniques for detecting binding between an antigen and an IgE antibody from a subject by contacting and binding the IgE antibody from a subject with the antigen, allowing an enzymatically labelled secondary antibody to act on the IgE antibody specifically bound to the antigen, and adding an enzyme substrate (generally, chromogenic or luminescent reagent) to detect an enzymatic reaction product. Also, a method for detecting a fluorescently labeled secondary antibody can be used. Furthermore, a method for detecting antigen-antibody binding as a refraction angle using surface plasmon resonance can be used.

[0892] The antigen may be provided as an isolated antigen in a state immobilized on a carrier. In this case, the steps (i) and (ii) mentioned above can be carried out using ELISA, sandwich immunoassay, or the like. Also, the step (i) mentioned above can be carried out by contacting the sample obtained from a subject with an antigen-immobilized surface. The isolated antigen may be obtained by separating and purifying it from soybean using a combination of protein purification methods well known to those skilled in the art, or by preparing it using a genetic recombination technique.

[0893] The antigen may be detected by immunoblotting in a state separated by two-dimensional electrophoresis. The two-dimensional electrophoresis is a technique for separating a protein sample by performing isoelectric focusing in the first dimension and performing SDS-PAGE (SDS-polyacrylamide gel electrophoresis) in the second dimension. The conditions for two-dimensional electrophoresis are not particularly limited as long as the conditions permit the separation of the antigen of the present invention. For example, the conditions for two-dimensional electrophoresis as described above in the subsection titled “Identification of antigens” can be adopted. Also, the electrophoresis conditions may be defined by reference to the descriptions in Patent Literatures 1 to 4 mentioned above. For example, two-dimensional electrophoresis can be carried out under the conditions that satisfy at least one selected from the group consisting of the following requirements:

(A) the isoelectric focusing gels used in the first dimension should have a gel-strip length of 5 to 10 cm and a gel pH range of 3 to 10, and the pH gradient of the gels in the direction of electrophoresis should be as follows: where the gel-strip length up to pH 5 is taken as “a”, that length from pH 5 to 7 as “b”, and that length above pH 7 as “c”, the relations “a<b” and “b>c” are satisfied;
(B) in the case of (A), when the total gel-strip length is taken as 1, “a” should be in the range of 0.15 to 0.3, “b” should be in the range of 0.4 to 0.7, and “c” should be in the range of 0.15 to 0.3;
(C) in the first dimensional isoelectric focusing, a constant voltage step should be performed by applying a constant voltage ranging from 100 V to 600 V per gel strip containing a sample, and after the electrophoresis variation width during electrophoresis for 30 minutes falls within the range of 5 μA, a voltage-increasing step should be started at which the voltage is increased from the aforementioned constant voltage;
(D) in the case of (C), the final voltage at the voltage-increasing step should be in the range of 3000 V to 6000 V;
(E) the isoelectric focusing gels used in the first dimension should have a longitudinal gel-strip length of 5 to 10 cm, and the electrophoresis gels used in the second dimension should have a gel concentration at the distal end in the direction of electrophoresis, which is in the range of 3 to 6%; and
(F) in the case of (E), the electrophoresis gels used in the second dimension should have a gel concentration at the proximal end in the direction of electrophoresis, which is set to a higher value than that at the distal end in the direction of electrophoresis.

[0894] The aforementioned antigens (1) to (8) and (1α) to (55α) are antigens that specifically bind to IgE antibodies from patients with allergy to soybean. Therefore, when binding between an IgE antibody from a subject and the antigen is detected, an indicator of the fact that the subject is allergic to soybean is provided.

[0895] The present invention further provides a kit for diagnosing an allergy to a soybean, comprising at least one of the aforementioned antigens (1) to (8) and (1α) to (55α). The diagnosis kit of this invention may be used in the aforementioned method for providing an indicator for diagnosing an allergy to a soybean or in a diagnosis method as described later. The diagnosis kit of this invention may comprise not only the at least one of the aforementioned antigens (1) to (8) and (1α) to (55α), but also an anti-IgE antibody labeled with an enzyme and a chromogenic or luminescent substrate serving as a substrate for the enzyme. Also, a fluorescent-labeled anti-IgE antibody may be used. In the diagnosis kit of this invention, the antigen may be provided in a state immobilized on a carrier. The diagnosis kit of this invention may also be provided together with instructions on the procedure for diagnosis or a package containing said instructions.

[0896] The present invention further provides a composition for diagnosing an allergy to a soybean, comprising at least one of the aforementioned antigens (1) to (8) and (1α) to (55α). The diagnosis composition of this invention can be used in a diagnosis method as described below. The diagnosis composition of this invention may further comprise a pharmaceutically acceptable carrier and/or additives commonly used with the antigen of this invention depending on the need.

[0897] In one mode, the present invention provides a method for diagnosing an allergy to a soybean in a subject, the method comprising:

(i) contacting a sample obtained from the subject with an antigen;
(ii) detecting binding between an IgE antibody present in the sample from the subject and the antigen; and
(iii) when the binding between the IgE antibody in the subject and the antigen is detected, diagnosing the subject as being allergic to a soybean;
wherein the antigen is at least one of proteins as defined above in any of (1) to (8) and (1α) to (55α). In this method, the steps (i) and (ii) are performed as described above regarding the corresponding steps of the method for providing an indicator for diagnosing an allergy to a soybean.

[0898] In another mode, the present invention provides a method for diagnosing an allergy to a soybean in a subject, the method comprising administering to the subject at least one of the aforementioned antigens (1) to (8) and (1α) to (55α). This method may be performed in the form of a skin test characterized by applying the antigen onto the skin. Examples of the skin test include various forms of tests, such as: a prick test in which a diagnosis composition is applied onto the skin and then a tiny prick to such an extent as not to provoke bleeding is made in the skin to allow an antigen to penetrate the skin, thereby observing a skin reaction; a scratch test in which a diagnosis composition is applied onto the skin and then the skin is lightly scratched to observe a reaction; a patch test in which a diagnosis composition in the form of cream, ointment, etc. is applied onto the skin to observe a reaction; and an intracutaneous test in which an antigen is administered intracutaneously to observe a reaction. If a skin reaction such as swelling occurs in a skin portion to which the antigen has been applied, the subject of interest is diagnosed as having an allergy to a soybean. The amount of the antigen to be applied to the skin in such tests can be, for example, not more than 100 μg per dose.

[0899] In yet another mode, the present invention provides at least one of the aforementioned antigens (1) to (8) and (1α) to (55α), intended for use in the diagnosis of an allergy to a soybean.

[0900] In still another mode, the present invention provides use of at least one of the aforementioned antigens (1) to (8) and (1α) to (55α) for the production of a diagnostic agent for an allergy to a soybean.

[0901] Pharmaceutical Composition and Treatment Method

[0902] The present invention provides a pharmaceutical composition comprising at least one of the aforementioned antigens (1) to (8) and (1α) to (55α). In one mode, the aforementioned pharmaceutical composition is used for the treatment and diagnosis of an allergy to a soybean.

[0903] The present invention also provides a method for treating an allergy to a soybean, the method comprising administering at least one of the aforementioned antigens (1) to (8) and (1α) to (55α) to a patient in need of a treatment for an allergy to a soybean.

[0904] In another mode, the present invention provides at least one of the aforementioned antigens (1) to (8) and (1α) to (55α), intended for use in the treatment for an allergy to a soybean. In yet another mode, the present invention provides use of at least one of the aforementioned antigens (1) to (8) and (1α) to (55α) for the production of a therapeutic agent for an allergy to a soybean.

[0905] In the process of allergy treatment, a hyposensitization therapy aiming to induce immunological tolerance by administering an antigen to a patient is often adopted. The at least one of the aforementioned antigens (1) to (8) and (1α) to (55α) can be used as an active ingredient for a hyposensitization therapy or a load test for an allergy to a soybean. Here, the antigen protein to be used in the hyposensitization therapy and the load test may be a protein that has been expressed and purified and may be a protein that has been expressed in food such as rice, such as rice-based vaccine expressing pollen allergens.

[0906] The pharmaceutical composition of the present invention can be administered by common administration routes. Examples of common administration routes include oral, sublingual, percutaneous, intracutaneous, subcutaneous, intravascular, intranasal, intramuscular, and intraperitoneal administrations.

[0907] The pharmaceutical composition of the present invention can be used as a pharmaceutical composition to which a commonly used pharmaceutically acceptable adjuvant or excipient or any other additives (e.g., stabilizer, solubilizer, emulsifier, buffer, preservative, colorant) are added by a conventional method together with the antigen of this invention depending on the need. The dosage form of the pharmaceutical composition can be selected by those skilled in the art as appropriate depending on the administration route. The pharmaceutical composition can be in the form of, for example, tablet, capsule, troche, sublingual tablet, parenteral injection, intranasal spray, poultice, solution, cream, or lotion. The administration dose, frequency and/or period of the pharmaceutical composition of this invention can be selected by a physician as appropriate depending on the administration route and the patient's condition and characteristics such as age and body weight. For example, the pharmaceutical composition may be administered to an adult patient at a dose of not more than 100 μg per dose. The administration interval can be, for example, once daily, once weekly, twice weekly, once per three months or so. The administration period can be, for example, several weeks to several years. The pharmaceutical composition may be administered in such a manner that the dose is increased in incremental steps over the administration period.

[0908] Tester

[0909] The present invention provides a tester comprising an antibody for at least one of the aforementioned antigens (1) to (8) and (1α) to (55α).

[0910] The antibody can be prepared by a conventional method. For example, the antibody may be prepared by immunizing a mammal such as rabbit with one of the aforementioned antigens (1) to (8) and (1α) to (55α). The antibody may be an Ig antibody, a polyclonal antibody, a monoclonal antibody, or an antigen-binding fragment thereof (e.g., Fab, F(ab′)₂, Fab′).

[0911] Further, in the aforementioned tester, the antibody may be provided in a form bound to a carrier. The type of the carrier is not particularly limited as long as it is usable for detection of binding between an antibody and an antigen. Any given carrier known to those skilled in the art can be used.

[0912] In one mode, the aforementioned tester is used to determine the presence or absence of an antigen in foods or in products of interest in a food production line. The tester may also be used for quality inspection of production lines and pre-shipment products by manufacturers, or may be used for self-checking of the presence or absence of an antigen in a food of interest by consumers.

[0913] Examples of a method for determining the presence or absence of an antigen include a method in which a prepared tester comprising an Ig antibody is contacted with a sample obtained from a food, etc., ELISA or the like method is used to detect whether there is a binding between the Ig antibody and an antigen in the sample, and if the binding between the Ig antibody and the antigen is detected, it is determined that the antibody remains in the food, etc. of interest.

[0914] Allergen-Free Food and the Like

[0915] The present invention provides a soybean or processed product of soybean in which at least one of the aforementioned antigens (1) to (8) and (1α) to (55α) is eliminated or reduced.

[0916] The method for eliminating or reducing the antigen of the present invention in a soybean or processed products of soybean is not limited. The elimination or reduction of the antigen may be conducted by any method, as long as the method permits the elimination or reduction of the antigen.

[0917] For example, the soybean of the present invention whose antigen is eliminated or reduced may be obtained by preparing a soybean in which the expression of the antigen of the present invention is knocked out, using a gene knock-out technique.

[0918] An antigen of the present invention may be the artefact that an antigen of the present invention assumed the removal or a reduced soybean raw material as for the removal or the reduced processed products of soybean. In the case of using an ordinary soybean as a source ingredient, a treatment for removing or reducing the antigen of this invention is performed before or after preparation of a processed product of soybean. The methods for removing or reducing the antigen of the present invention include a method to remove protein component in a high pressure treatment and food such as elution with the neutral salt solution or the high temperature steam with an antigen of the present invention in the processed products of soybean which assumed a normal soybean raw material.

### EXAMPLES

[0919] The following describes examples of the present invention. The technical scope of this invention is not limited by these examples.

### Example 1: Confirmation of a Protein Pattern

[0920] Proteins contained in soybean were investigated using a two-dimensional electrophoresis method described below.

[0921] Protein Extraction

[0922] Commercially available dry soybeans (several beans) were powdered. 500 μl of water was added to 50 mg of the powder and shaking extraction was conducted using a vortex mixer at 25° C. for 10 minutes. After the shaking extraction, a liquid protein extract was collected.

[0923] Thereafter, the precipitation procedure was repeated twice using a 2D-CleanUP Kit (produced by GE). In the first round ofprecipitation, the collected liquid protein extract was precipitated by adding TCA (trichloroacetic acid) thereto and the precipitated product produced by this procedure (TCA-precipitated product) was collected. In the second round of precipitation, the TCA-precipitated product collected above was further precipitated by adding acetone thereto and the precipitated product (sample) produced by this procedure was collected.

[0924] Preparation of a Sample Solution

[0925] Part of the collected sample (50 μg on a protein weight basis) was dissolved in 150 μL of a DeStreak Rehydration Solution (produced by GE), which is a swelling buffer for first-dimensional isoelectric focusing gels, thereby obtaining a sample solution for first-dimensional isoelectric focusing (sample solution for swelling). The constituents of the DeStreak Rehydration Solution are as mentioned below.

7M thiourea
2M urea
4% (w/v) of CHAPS
(3-[(3-cholamidopropyl)dimethylammonio]propanesulfonate)
0.5% (v/v) IPG buffer; produced by GE
Moderate amount of BPB (bromophenol blue)

[0926] Penetration of the Sample into First-Dimensional Isoelectric Focusing Gels

[0927] First-dimensional isoelectric focusing gel strips (Immobiline Drystrip IPG gels (pH3-10NL); produced by GE) were immersed in 140 μL of the foregoing sample solution for first-dimensional isoelectric focusing (sample solution for swelling) and impregnated with the solution at room temperature overnight.

[0928] In this example, an IPGphor electrophoresis system produced by GE was used.

[0929] An electrophoresis tray was filled with silicone oil. Filter paper moisten with water was positioned at both ends of the gel strips impregnated with the sample, and the gel strips were set in the electrophoresis tray such that the gel strips were covered with silicone oil. Electrodes were placed on the gel strips with the filter paper intervening therebetween.

[0930] The maximum current of the isoelectric focusing system was set to 75 μA per gel strip, and the first-dimensional isoelectric focusing was carried out according to the following voltage program: (1) a constant voltage step was performed at a constant voltage of 300 V until the volt-hours reached 750 Vhr (the current variation width during electrophoresis for 30 minutes before the end of this step was 5 μA); (2) the voltage was increased gradually to 1000 V for 300 Vhr; (3) the voltage was further increased gradually to 5000 V for 4500 Vhr; and then (4) the voltage was held at a constant voltage of 5000 V until the total Vhr reached 12000.

[0931] SDS Equilibration of Isoelectric Focusing Gels

[0932] After the aforementioned first-dimensional isoelectric focusing was done, the gel strips were taken out of the isoelectric focusing system, immersed in an equilibration buffer containing a reducing agent, and shaken at room temperature for 15 minutes. The constituents of the equilibration buffer containing the reducing agent are as mentioned below.

100 mM Tris-HCl (pH 8.0)
6M urea
30% (v/v) glycerol
2% (w/v) SDS
1% (w/v) DTT

[0933] Next, the equilibration buffer containing the reducing agent was removed, and then the gel strips were immersed in an equilibration buffer containing an alkylating agent and shaken at room temperature for 15 minutes to obtain SDS-equilibrated gels. The constituents of the equilibration buffer containing the alkylating agent are as mentioned below.

100 mM Tris-HCl (pH 8.0)
6M urea
30% (v/v) glycerol
2% (w/v) SDS
2.5% (w/v) iodoacetamide

[0934] Second-Dimensional SDS-PAGE

[0935] In this example, the XCell SureLock Mini-Cell electrophoresis system produced by Life Technologies was used. The second-dimensional electrophoresis gels used were NuPAGE 4-12% Bis-Tris Gels produced by Life Technologies. Also, an electrophoresis buffer composed of the following constituents was prepared and used.

50 mM MOPS
50 mM Tris base
0.1% (w/v) SDS
1 mM EDTA

[0936] Further, an agarose solution for gel adhesion was used in this example, which was prepared by dissolving 0.5% (w/v) Agarose S (produced by Nippon Gene Co., Ltd.) and a moderate amount of BPB (bromophenol blue) in the electrophoresis buffer.

[0937] SDS-PAGE wells were washed well with the electrophoresis buffer, and then the buffer used for the washing was removed. Next, the washed wells were charged with the fully dissolved agarose solution for gel adhesion. Next, the SDS-equilibrated gel strips were immersed in agarose and closely adhered to second-dimensional electrophoresis gels using tweezers. After it was confirmed that agarose was fully fixed with the gels being closely adhered to each other, electrophoresis was performed at a constant voltage of 200 V for about 45 minutes.

[0938] Fluorescent Staining of Gels

[0939] The gels were fluorescently stained with SYPRO Ruby (produced by Life Technologies).

[0940] First, an airtight container to be used was washed well in advance with 98% (v/v) ethanol. The electrophoresed second-dimensional electrophoresis gel strips were taken out of the SDS-PAGE system, placed onto the washed airtight container, and treated twice by immersion in 50% (v/v) methanol and 7% (v/v) aqueous solution containing acetic acid for 30 minutes. Then, a further immersion treatment was done for 10 minutes, with the solution being replaced by water. Next, the second-dimensional electrophoresis gel strips were immersed in 40 mL of SYPRO Ruby and shaken at room temperature overnight. Thereafter, the SYPRO Ruby was removed, and then the second-dimensional electrophoresis gel strips were washed with water and shaken in 10% (v/v) methanol and 7% (v/v) aqueous solution containing acetic acid for 30 minutes. Further shaking was done for at least 30 minutes, with the solution being replaced by water.

[0941] Analysis

[0942] The second-dimensional electrophoresis gels obtained through the foregoing series of treatments were subjected to fluorescent image scanning on Typhoon 9400 (produced by GE). The results of the two-dimensional electrophoresis are shown in FIG. 1. Molecular weight marker bands are found at the left of the panels. The positions of the bands denote particular molecular weights (in KDa).

### Example 2: Identification of Antigens by Immunoblotting (1)

[0943] Identification of antigens by immunoblotting was carried out by taking all the steps up to the step of “Second-dimensional SDS-PAGE” as described above in Example 1, followed by the steps of “Transfer to membrane”, “Immunoblotting” and “Analysis” as described below.

[0944] Transfer to Membrane

[0945] Transfer to membrane was done using the following transfer system and transfer buffer.

Transfer system: XCell SureLock Mini-Cell and XCell II Blot Module (produced by Life Technologies)
Transfer buffer: NuPAGE Transfer Buffer (X20) (produced by Life Technologies), used in a form diluted 20-fold with milliQ water.

[0946] To be specific, proteins in the two-dimensional electrophoresis gels were transferred to a membrane (PVDF membrane) according to the following procedure.

(1) The PVDF membrane was immersed in 100% methanol followed by milliQ water, and then moved into the transfer buffer to hydrophilize the PVDF membrane.
(2) After sponge, filter paper, the gels treated by second-dimensional SDS-PAGE, the hydrophilized PVDF membrane, filter paper, and sponge were put in place in this order, the transfer system was energized at a constant voltage of 30 V for one hour.

[0947] Immunoblotting

[0948] Immunoblotting of the membrane was carried out using, as a primary antibody, a serum sample from a patient with a soybean allergy or a serum sample from a healthy subject.

[0949] Immunoblotting of the membrane was carried out according to the following procedure.

(1) The transferred membrane was shaken in a 5% skim milk/PBST solution (a PBS buffer containing 0.3% Tween 20 nonionic surfactant) at room temperature for one hour.
(2) The membrane was left to stand in a solution of 3% primary antibody serum in 5% skim milk/PBST at room temperature for one hour.
(3) The membrane was washed with a PBST solution (5 min.×3 times).
(4) The membrane was left to stand in a 1:2500 dilution of the secondary antibody, anti-human IgE-HRP (horseradish peroxidase), with a 3% skim milk/PBST solution at room temperature for one hour.
(5) The membrane was washed with a PBST solution (5 min.×3 times).
(6) The membrane was left to stand in Pierce Western Blotting Substrate Plus (produced by Thermo Fisher Scientific) for 5 minutes.

[0950] Analysis

[0951] The membrane obtained through the foregoing series of treatments was subjected to fluorescent image scanning on Typhoon 9400 (produced by GE).

[0952] The immunoblots obtained with the serum from the soybean-allergic patient were compared with those obtained with the control serum from the healthy subject. By immunoblotting using the serum from soybean-allergic Patient 1, Patient 2, Patient 3, and Patient 4, 8 spots were detected (FIGS. 3A to D), which are different from the spots detected when the serum of the healthy subject was used (FIG. 2) and different from those of the known soybean allergen proteins.

[0953] The molecular weights and isoelectric points of the 8 spots are as follows.

Spot 1: Molecular weight 5 to 20 kDa, pI 4.0 to 6.0
Spot 2: Molecular weight 40 to 60 kDa, pI 5.5 to 7.5
Spot 3: Molecular weight 25 to 37 kDa, pI 8.0 to 10.0
Spot 4: Molecular weight 25 to 37 kDa, pI 7.0 to 9.0
Spot 5: Molecular weight 5 to 20 kDa, pI 5.0 to 7.0
Spot 6: Molecular weight 60 to 75 kDa, pI 6.0 to 8.0
Spot 7: Molecular weight 15 to 25 kDa, pI 4.0 to 6.0
Spot 8: Molecular weight 100 to 150 kDa, pI 4.0 to 6.0

### Example 3: Mass Spectrometry and Identification of Antigens (1)

[0954] The amino acid sequences of the antigens that form the above eight protein spots were identified by mass spectroscopy.

[0955] To be specific, protein extraction and mass spectroscopy were done by the following procedure.

(1) Soybeans were subjected to protein extraction, two-dimensional electrophoresis and transfer to membrane by following the procedures described in Example 1 and 2, and the resulting membrane was stained by shaking in a solution of 0.008% Direct blue in 40% ethanol and 10% acetic acid.
(2) Then, the membrane was decolorized by repeating a 5-minute treatment with 40% ethanol and 10% acetic acid three times, washed with water for 5 minutes, and then dried by air.
(3) A protein spot of interest was cut out with a clean cutter blade and put into a centrifugal tube. The cut membrane was subjected to hydrophilization with 50 μL of methanol, followed by washing with 100 μL of water twice and then centrifugal cleaning. Thereafter, 20 μL of 20 mM NH₄HCO₃ and 50% acetonitrile were added.
(4) 1 μL of 1 pmol/μL lysyl endopeptidase (produced by WAKO) was added, and the solution was left to stand at 37° C. for 60 minutes and then collected in a new centrifugal tube. After 20 μL of 20 mM NH₄HCO₃ and 70% acetonitrile were added to the membrane, the membrane was immersed therein at room temperature for 10 minutes, and the resulting solution was further collected. The solution was dissolved with 0.1% formic acid and 10 μL of 4% acetonitrile and transferred to a tube.
(5) The collected solution was dried under reduced pressure, dissolved with 15 μL of solution A (a 0.1% formic acid/4% acetonitrile solution), and analyzed by mass spectroscopy (ESI-TOF5600, produced by AB Sciex).
(6) Identification of proteins based on the MS data obtained with the mass spectrometer was done by searching the NCBI database.

[0956] Results

[0957] The mass spectrometry of the spots resulted in the detection of the following amino acid sequences.

Spot 1: the amino acid sequences set forth in SEQ ID NO: 17 to 20
Spot 2: the amino acid sequences set forth in SEQ ID NO: 21 to 28
Spot 3: the amino acid sequences set forth in SEQ ID NO: 29, 30
Spot 4: the amino acid sequences set forth in SEQ ID NO: 31, 32
Spot 5: the amino acid sequences set forth in SEQ ID NO: 33, 34
Spot 6: the amino acid sequences set forth in SEQ ID NO: 35 to 53
Spot 7: the amino acid sequences set forth in SEQ ID NO: 54 to 61
Spot 8: the amino acid sequences set forth in SEQ ID NO: 62 to 68

[0958] Furthermore, the spots were identified as the following proteins by the analysis of the mass data obtained from the mass spectrometer for the spots at NCBI.

Spot 1: Bowman-Birk type proteinase inhibitor D-II (UniProt accession number P01064, amino acid sequence: SEQ ID NO: 2, encoding nucleotide sequence: SEQ ID NO: 1)
Spot 2: Ribulose bisphosphate carboxylase large chain (UniProt accession number P27066, amino acid sequence: SEQ ID NO: 4, encoding nucleotide sequence: SEQ ID NO: 3)
Spot 3: Gamma-glutamyl hydrolase (UniProt accession number P93164, amino acid sequence: SEQ ID NO: 6, encoding nucleotide sequence: SEQ ID NO: 5)
Spot 4: Guanine nucleotide-binding protein subunit beta-like protein (UniProt accession number Q39836, amino acid sequence: SEQ ID NO: 8, encoding nucleotide sequence: SEQ ID NO: 7)
Spot 5: Protein SLE3 (UniProt accession number C6T0L2, amino acid sequence: SEQ ID NO: 10, encoding nucleotide sequence: SEQ ID NO: 9)
Spot 6: Seed biotin-containing protein SBP65 (UniProt accession number Q39846, amino acid sequence: SEQ ID NO: 12, encoding nucleotide sequence: SEQ ID NO: 11)
Spot 7: Ferritin-2 (UniProt accession number Q94IC4, amino acid sequence: SEQ ID NO: 14, encoding nucleotide sequence: SEQ ID NO: 13)
Spot 8: Cell division cycle protein 48 homolog (UniProt accession number P54774, amino acid sequence: SEQ ID NO: 16, encoding nucleotide sequence: SEQ ID NO: 15)

### Example 4: Identification of Antigens by Immunoblotting (2)

[0959] The immunoblots obtained with the serum from the soybean-allergic patient were compared with those obtained with the control serum from the healthy subject, in the same manner as in Example 2. By immunoblotting using the serum from soybean-allergic Patient 1α, Patient 2α, Patient 3α, Patient 4α, Patient 5α, Patient 6α, Patient 7α, Patient 8α, and Patient 9α, 56 spots were detected (FIGS. 5A to I), which are different from the spots detected when the serum of the healthy subject was used (FIG. 4) and different from those of the known soybean allergen proteins.

[0960] The molecular weights and isoelectric points of the 56 spots are as follows.

Spot 1α: Molecular weight 80 to 110 kDa, pI 3.0 to 6.0
Spot 2α: Molecular weight 60 to 110 kDa, pI 3.0 to 6.0
Spot 3α: Molecular weight 100 to 150 kDa, pI 4.0 to 6.0
Spot 4α: Molecular weight 80 to 110 kDa, pI 4.0 to 7.0
Spot 5α: Molecular weight 80 to 160 kDa, pI 4.0 to 7.0
Spot 6α: Molecular weight 80 to 110 kDa, pI 4.0 to 7.0
Spot 7α: Molecular weight 60 to 110 kDa, pI 4.0 to 7.0
Spot 8α: Molecular weight 60 to 110 kDa, pI 4.0 to 8.0
Spot 9α: Molecular weight 60 to 110 kDa, pI 4.0 to 8.0
Spot 10α: Molecular weight 40 to 80 kDa, pI 4.0 to 7.0
Spot 11α: Molecular weight 40 to 80 kDa, pI 4.0 to 8.0
Spot 12α: Molecular weight 40 to 80 kDa, pI 4.0 to 8.0
Spot 13α: Molecular weight 40 to 80 kDa, pI 4.0 to 7.0
Spot 14α: Molecular weight 40 to 80 kDa, pI 3.0 to 6.0
Spot 15α, 16α: Molecular weight 30 to 80 kDa, pI 4.0 to 7.0
Spot 17α: Molecular weight 30 to 80 kDa, pI 4.0 to 7.0
Spot 18α: Molecular weight 40 to 80 kDa, pI 4.0 to 8.0
Spot 19α: Molecular weight 40 to 80 kDa, pI 4.0 to 8.0
Spot 20α: Molecular weight 60 to 75 kDa, pI 6.0 to 8.0
Spot 21α: Molecular weight 40 to 60 kDa, pI 5.0 to 8.0
Spot 22α: Molecular weight 25 to 37 kDa, pI 8.0 to 10.0
Spot 23α: Molecular weight 25 to 37 kDa, pI 7.0 to 9.0
Spot 24α: Molecular weight 5 to 20 kDa, pI 5.0 to 7.0
Spot 25α: Molecular weight 30 to 80 kDa, pI 4.0 to 7.0
Spot 26α: Molecular weight 30 to 80 kDa, pI 4.0 to 7.0
Spot 27α: Molecular weight 30 to 80 kDa, pI 4.0 to 7.0
Spot 28α: Molecular weight 20 to 60 kDa, pI 4.0 to 7.0
Spot 29α, 30α, 31α, 32α, 33α: Molecular weight 20 to 60 kDa, pI 4.0 to 8.0
Spot 34α: Molecular weight 20 to 60 kDa, pI 6.0 to 10.0
Spot 35α: Molecular weight 30 to 80 kDa, pI 6.0 to 10.0
Spot 36α, 37α: Molecular weight 20 to 60 kDa, pI 4.0 to 8.0
Spot 38α: Molecular weight 80 to 160 kDa, pI 6.0 to 10.0
Spot 39α: Molecular weight 10 to 50 kDa, pI 6.0 to 10.0
Spot 40α, 56α: Molecular weight 10 to 50 kDa, pI 6.0 to 10.0
Spot 41α: Molecular weight 10 to 50 kDa, pI 6.0 to 10.0
Spot 42α, 43α: Molecular weight 10 to 50 kDa, pI 6.0 to 10.0
Spot 44α: Molecular weight 10 to 50 kDa, pI 4.0 to 7.0
Spot 45α: Molecular weight 5 to 40 kDa, pI 4.0 to 7.0
Spot 46α: Molecular weight 5 to 40 kDa, pI 4.0 to 7.0
Spot 47α: Molecular weight 5 to 40 kDa, pI 4.0 to 7.0
Spot 48α: Molecular weight 5 to 40 kDa, pI 4.0 to 8.0
Spot 49α: Molecular weight 5 to 20 kDa, pI 4.0 to 7.0
Spot 50α: Molecular weight 5 to 40 kDa, pI 3.0 to 6.0
Spot 51α: Molecular weight 10 to 50 kDa, pI 3.0 to 6.0
Spot 52α: Molecular weight 20 to 60 kDa, pI 4.0 to 7.0
Spot 53α: Molecular weight 10 to 50 kDa, pI 4.0 to 8.0
Spot 54α: Molecular weight 10 to 50 kDa, pI 4.0 to 8.0
Spot 55α: Molecular weight 40 to 80 kDa, pI 6.0 to 10.0

### Example 5: Mass Spectrometry and Identification of Antigens (2)

[0961] The amino acid sequences of the antigens that form the 56 protein spots were identified by mass spectroscopy, in the same manner as in Example 3.

[0962] The mass spectrometry of the spots resulted in the detection of the following amino acid sequences. Furthermore, the spots were identified as the following proteins by the analysis of the mass data obtained from the mass spectrometer for the spots at NCBI.

[0963] Spot 1α:

[0964] The amino acid sequences set forth in SEQ ID NOs: 71 to 87 were detected by the mass spectrometry. The protein identified from this mass data was endoplasmin homolog isoform X2 (NCBI accession number XP_006596543.1, amino acid sequence: SEQ ID NO: 70, encoding nucleotide sequence: SEQ ID NO: 69).

[0965] The amino acid sequences set forth in SEQ ID NOs: 90 to 104 were detected by the mass spectrometry. The protein identified from this mass data was endoplasmin homolog isoform X2 (NCBI accession number XP_006601356.1, amino acid sequence: SEQ ID NO: 89, encoding nucleotide sequence: SEQ ID NO: 88).

[0966] Spot 2α

[0967] The amino acid sequences set forth in SEQ ID NOs: 107 to 120 were detected by the mass spectrometry. The protein identified from this mass data was heat shock cognate protein 80 (NCBI accession number XP_003544594.1, amino acid sequence: SEQ ID NO: 106, encoding nucleotide sequence: SEQ ID NO: 105).

[0968] The amino acid sequences set forth in SEQ ID NOs: 123 to 137 were detected by the mass spectrometry. The protein identified from this mass data was heat shock protein 90-1 (NCBI accession number NP_001236612.1, amino acid sequence: SEQ ID NO: 122, encoding nucleotide sequence: SEQ ID NO: 121).

[0969] The amino acid sequences set forth in SEQ ID NOs: 140 to 153 were detected by the mass spectrometry. The protein identified from this mass data was hypothetical protein GLYMA_02G302500 (NCBI accession number KRH73936.1, amino acid sequence: SEQ ID NO: 139, encoding nucleotide sequence: SEQ ID NO: 138).

[0970] Spot 3α:

[0971] The amino acid sequences set forth in SEQ ID NOs: 62 to 68 were detected by the mass spectrometry, as in Spot 8 of Example 3. The protein identified from this mass data was Cell division cycle protein 48 homolog (UniProt accession number P54774, amino acid sequence: SEQ ID NO: 16, encoding nucleotide sequence: SEQ ID NO: 15).

[0972] Spot 4α:

[0973] The amino acid sequences set forth in SEQ ID NOs: 156, 157 were detected by the mass spectrometry. The protein identified from this mass data was embryo-specific urease isoform X1 (NCBI accession number XP_014630847.1, amino acid sequence: SEQ ID NO: 155, encoding nucleotide sequence: SEQ ID NO: 154).

[0974] Spot 5α:

[0975] The amino acid sequences set forth in SEQ ID NOs: 160, 161 were detected by the mass spectrometry. The protein identified from this mass data was alpha-1,4 glucan phosphorylase L isozyme, chloroplastic/amyloplastic (NCBI accession number XP_006603904.1, amino acid sequence: SEQ ID NO: 159, encoding nucleotide sequence: SEQ ID NO: 158).

[0976] Spot 6α:

[0977] The amino acid sequences set forth in SEQ ID NOs: 164 to 167 were detected by the mass spectrometry. The protein identified from this mass data was aconitate hydratase 1 (NCBI accession number XP_003537655.1, amino acid sequence: SEQ ID NO: 163, encoding nucleotide sequence: SEQ ID NO: 162).

[0978] The amino acid sequences set forth in SEQ ID NOs: 170 to 172 were detected by the mass spectrometry. The protein identified from this mass data was aconitate hydratase 1 (NCBI accession number XP_003517155.1, amino acid sequence: SEQ ID NO: 169, encoding nucleotide sequence: SEQ ID NO: 168).

[0979] Spot 7α:

[0980] The amino acid sequences set forth in SEQ ID NOs: 175 to 187 were detected by the mass spectrometry. The protein identified from this mass data was methionine synthase (NCBI accession number NP_001235794.1, amino acid sequence: SEQ ID NO: 174, encoding nucleotide sequence: SEQ ID NO: 173).

[0981] Spot 8α:

[0982] The amino acid sequences set forth in SEQ ID NOs: 190 to 199 were detected by the mass spectrometry. The protein identified from this mass data was transketolase, chloroplastic (NCBI accession number XP_003521870.1, amino acid sequence: SEQ ID NO: 189, encoding nucleotide sequence: SEQ ID NO: 188).

[0983] Spot 9α:

[0984] The amino acid sequence set forth in SEQ ID NO: 202 was detected by the mass spectrometry. The protein identified from this mass data was lysine-tRNA ligase, cytoplasmic-like isoform X2 (NCBI accession number XP_014625509.1, amino acid sequence: SEQ ID NO: 201, encoding nucleotide sequence: SEQ ID NO: 200).

[0985] Spot 10α

[0986] The amino acid sequences set forth in SEQ ID NOs: 205 to 218 were detected by the mass spectrometry. The protein identified from this mass data was chaperonin CPN60-2, mitochondrial (NCBI accession number XP_003556325.1, amino acid sequence: SEQ ID NO: 204, encoding nucleotide sequence: SEQ ID NO: 203).

[0987] The amino acid sequences set forth in SEQ ID NOs: 221 to 231 were detected by the mass spectrometry. The protein identified from this mass data was chaperonin CPN60-2, mitochondrial-like isoform X1 (NCBI accession number XP_003535967.1, amino acid sequence: SEQ ID NO: 220, encoding nucleotide sequence: SEQ ID NO: 219).

[0988] Spot 11α:

[0989] The amino acid sequences set forth in SEQ ID NOs: 234 to 237 were detected by the mass spectrometry. The protein identified from this mass data was polyadenylate-binding protein 8 isoform X3 (NCBI accession number XP_006578034.1, amino acid sequence: SEQ ID NO: 233, encoding nucleotide sequence: SEQ ID NO: 232).

[0990] Spot 12α:

[0991] The amino acid sequence set forth in SEQ ID NO: 240 was detected by the mass spectrometry. The protein identified from this mass data was pyrophosphate-fructose 6-phosphate 1-phosphotransferase subunit alpha-like (NCBI accession number XP_003555655.1, amino acid sequence: SEQ ID NO: 239, encoding nucleotide sequence: SEQ ID NO: 238).

[0992] Spot 13α:

[0993] The amino acid sequences set forth in SEQ ID NOs: 243 to 252 were detected by the mass spectrometry. The protein identified from this mass data was protein disulfide isomerase-like protein precursor (NCBI accession number NP_001238009.1, amino acid sequence: SEQ ID NO: 242, encoding nucleotide sequence: SEQ ID NO: 241).

[0994] The amino acid sequences set forth in SEQ ID NOs: 255 to 278 were detected by the mass spectrometry. The protein identified from this mass data was protein disulfide-isomerase (NCBI accession number XP_006581588.1, amino acid sequence: SEQ ID NO: 254, encoding nucleotide sequence: SEQ ID NO: 253).

[0995] Spot 14α:

[0996] The amino acid sequences set forth in SEQ ID NOs: 281 to 284 were detected by the mass spectrometry. The protein identified from this mass data was V-type proton ATPase subunit B 2 (NCBI accession number XP_003552473.1, amino acid sequence: SEQ ID NO: 280, encoding nucleotide sequence: SEQ ID NO: 279).

[0997] The amino acid sequences set forth in SEQ ID NOs: 287 to 289 were detected by the mass spectrometry. The protein identified from this mass data was V-type proton ATPase subunit B 2 (NCBI accession number XP_006605857.1, amino acid sequence: SEQ ID NO: 286, encoding nucleotide sequence: SEQ ID NO: 275).

[0998] Spots 15α, 16α:

[0999] The amino acid sequences set forth in SEQ ID NOs: 292 to 304 were detected by the mass spectrometry. The protein identified from this mass data was UTP-glucose-1-phosphate uridylyltransferase (NCBI accession number XP_003544964.1, amino acid sequence: SEQ ID NO: 291, encoding nucleotide sequence: SEQ ID NO: 290).

[1000] The amino acid sequences set forth in SEQ ID NOs: 307 to 318 were detected by the mass spectrometry. The protein identified from this mass data was hypothetical protein GLYMA_02G241100 (NCBI accession number KRH72929.1, amino acid sequence: SEQ ID NO: 306, encoding nucleotide sequence: SEQ ID NO: 305).

[1001] Spot 17α:

[1002] The amino acid sequences set forth in SEQ ID NOs: 321 to 325 were detected by the mass spectrometry. The protein identified from this mass data was guanosine nucleotide diphosphate dissociation inhibitor 2 (NCBI accession number XP_003531293.1, amino acid sequence: SEQ ID NO: 320, encoding nucleotide sequence: SEQ ID NO: 319).

[1003] The amino acid sequences set forth in SEQ ID NOs: 328 to 332 were detected by the mass spectrometry. The protein identified from this mass data was rab GDP dissociation inhibitor alpha-like (NCBI accession number NP_001276273.1, amino acid sequence: SEQ ID NO: 327, encoding nucleotide sequence: SEQ ID NO: 326).

[1004] Spot 18α:

[1005] The amino acid sequences set forth in SEQ ID NOs: 335 to 339 were detected by the mass spectrometry. The protein identified from this mass data was hypothetical protein GLYMA_10G028300 (NCBI accession number KRH32039.1, amino acid sequence: SEQ ID NO: 334, encoding nucleotide sequence: SEQ ID NO: 333).

[1006] Spot 19α:

[1007] The amino acid sequences set forth in SEQ ID NOs: 342 to 346 were detected by the mass spectrometry. The protein identified from this mass data was sucrose binding protein homolog S-64 (NCBI accession number AAF05723.1, amino acid sequence: SEQ ID NO: 341, encoding nucleotide sequence: SEQ ID NO: 340).

[1008] Spot 20α:

[1009] The amino acid sequences set forth in SEQ ID NOs: 35 to 53 were detected by the mass spectrometry, as in Spot 6 of Example 3. The protein identified from this mass data was Seed biotin-containing protein SBP65 (UniProt accession number Q39846, amino acid sequence: SEQ ID NO: 12, encoding nucleotide sequence: SEQ ID NO: 11).

[1010] Spot 21α:

[1011] The amino acid sequences set forth in SEQ ID NOs: 21 to 28 were detected by the mass spectrometry, as in Spot 2 of Example 3. The protein identified from this mass data was Ribulose bisphosphate carboxylase large chain (UniProt accession number P27066, amino acid sequence: SEQ ID NO: 4, encoding nucleotide sequence: SEQ ID NO: 3).

[1012] Spot 22α:

[1013] The amino acid sequences set forth in SEQ ID NOs: 29, 30 were detected by the mass spectrometry, as in Spot 3 of Example 3. The protein identified from this mass data was Gamma-glutamyl hydrolase (UniProt accession number P93164, amino acid sequence: SEQ ID NO: 6, encoding nucleotide sequence: SEQ ID NO: 5).

[1014] Spot 23α:

[1015] The amino acid sequences set forth in SEQ ID NOs: 31, 32 were detected by the mass spectrometry, as in Spot 4 of Example 3. The protein identified from this mass data was Guanine nucleotide-binding protein subunit beta-like protein (UniProt accession number Q39836, amino acid sequence: SEQ ID NO: 8, encoding nucleotide sequence: SEQ ID NO: 7).

[1016] Spot 24α:

[1017] The amino acid sequences set forth in SEQ ID NOs: 33, 34 were detected by the mass spectrometry, as in Spot 5 of Example 3. The protein identified from this mass data was Protein SLE3 (UniProt accession number C6T0L2, amino acid sequence: SEQ ID NO: 10, encoding nucleotide sequence: SEQ ID NO: 9).

[1018] Spot 25α:

[1019] The amino acid sequences set forth in SEQ ID NOs: 349 to 356 were detected by the mass spectrometry. The protein identified from this mass data was succinyl-CoA ligase [ADP-forming] subunit beta, mitochondrial (NCBI accession number XP_003537078.1, amino acid sequence: SEQ ID NO: 348, encoding nucleotide sequence: SEQ ID NO: 347).

[1020] The amino acid sequences set forth in SEQ ID NOs: 359 to 365 were detected by the mass spectrometry. The protein identified from this mass data was succinyl-CoA ligase [ADP-forming] subunit beta, mitochondrial (NCBI accession number XP_003542431.1, amino acid sequence: SEQ ID NO: 358, encoding nucleotide sequence: SEQ ID NO: 357).

[1021] Spot 26α:

[1022] The amino acid sequences set forth in SEQ ID NOs: 368 to 382 were detected by the mass spectrometry. The protein identified from this mass data was phosphoglycerate kinase, cytosolic (NCBI accession number XP_003546821.1, amino acid sequence: SEQ ID NO: 367, encoding nucleotide sequence: SEQ ID NO: 366).

[1023] The amino acid sequences set forth in SEQ ID NOs: 385 to 392 were detected by the mass spectrometry. The protein identified from this mass data was phosphoglycerate kinase, cytosolic (NCBI accession number XP_003531482.1, amino acid sequence: SEQ ID NO: 384, encoding nucleotide sequence: SEQ ID NO: 383).

[1024] The amino acid sequences set forth in SEQ ID NOs: 395 to 409 were detected by the mass spectrometry. The protein identified from this mass data was phosphoglycerate kinase, cytosolic (NCBI accession number XP_003531483.1, amino acid sequence: SEQ ID NO: 394, encoding nucleotide sequence: SEQ ID NO: 393).

[1025] Spot 27α:

[1026] The amino acid sequences set forth in SEQ ID NOs: 412 to 416 were detected by the mass spectrometry. The protein identified from this mass data was alcohol dehydrogenase 1 (NCBI accession number XP_003526673.1, amino acid sequence: SEQ ID NO: 411, encoding nucleotide sequence: SEQ ID NO: 410).

[1027] The amino acid sequences set forth in SEQ ID NOs: 419, 420 were detected by the mass spectrometry. The protein identified from this mass data was alcohol dehydrogenase 1 (NCBI accession number XP_003545664.3, amino acid sequence: SEQ ID NO: 418, encoding nucleotide sequence: SEQ ID NO: 417).

[1028] The amino acid sequences set forth in SEQ ID NOs: 423 to 427 were detected by the mass spectrometry. The protein identified from this mass data was alcohol dehydrogenase 1-like (NCBI accession number XP_003544738.1, amino acid sequence: SEQ ID NO: 422, encoding nucleotide sequence: SEQ ID NO: 421).

[1029] Spot 28α:

[1030] The amino acid sequences set forth in SEQ ID NOs: 430 to 433 were detected by the mass spectrometry. The protein identified from this mass data was 35 kDa seed maturation protein isoform X1 (NCBI accession number XP_006576267.1, amino acid sequence: SEQ ID NO: 429, encoding nucleotide sequence: SEQ ID NO: 428).

[1031] Spots 29α, 30α, 31α, 32α, 33α:

[1032] The amino acid sequences set forth in SEQ ID NOs: 436 to 439 were detected by the mass spectrometry. The protein identified from this mass data was glyceraldehyde-3-phosphate dehydrogenase isoform X1 (NCBI accession number XP_014631598.1, amino acid sequence: SEQ ID NO: 435, encoding nucleotide sequence: SEQ ID NO: 434).

[1033] The amino acid sequences set forth in SEQ ID NOs: 442 to 445 were detected by the mass spectrometry. The protein identified from this mass data was glyceraldehyde-3-phosphate dehydrogenase, cytosolic (NCBI accession number XP_006578692.1, amino acid sequence: SEQ ID NO: 441, encoding nucleotide sequence: SEQ ID NO: 440).

[1034] The amino acid sequences set forth in SEQ ID NOs: 448 to 451 were detected by the mass spectrometry. The protein identified from this mass data was uncharacterized protein LOC100782924 (NCBI accession number NP_001240046.1, amino acid sequence: SEQ ID NO: 447, encoding nucleotide sequence: SEQ ID NO: 446).

[1035] Spot 34α:

[1036] The amino acid sequence set forth in SEQ ID NO: 454 was detected by the mass spectrometry. The protein identified from this mass data was bifunctional UDP-glucose 4-epimerase and UDP-xylose 4-epimerase 1-like (NCBI accession number XP_003532591.1, amino acid sequence: SEQ ID NO: 453, encoding nucleotide sequence: SEQ ID NO: 452).

[1037] The amino acid sequences set forth in SEQ ID NOs: 457, 458 were detected by the mass spectrometry. The protein identified from this mass data was uncharacterized protein LOC100803483 (NCBI accession number NP_001241075.1, amino acid sequence: SEQ ID NO: 456, encoding nucleotide sequence: SEQ ID NO: 455).

[1038] Spot 35α:

[1039] The amino acid sequences set forth in SEQ ID NOs: 461 to 466 were detected by the mass spectrometry. The protein identified from this mass data was elongation factor 1-alpha (NCBI accession number XP_003553292.1, amino acid sequence: SEQ ID NO: 460, encoding nucleotide sequence: SEQ ID NO: 459).

[1040] The amino acid sequences set forth in SEQ ID NOs: 469 to 471 were detected by the mass spectrometry. The protein identified from this mass data was elongation factor 1-alpha (NCBI accession number XP_003547695.1, amino acid sequence: SEQ ID NO: 468, encoding nucleotide sequence: SEQ ID NO: 467).

[1041] The amino acid sequences set forth in SEQ ID NOs: 474 to 477 were detected by the mass spectrometry. The protein identified from this mass data was elongation factor-1A isoform X1 (NCBI accession number XP_006600131.1, amino acid sequence: SEQ ID NO: 473, encoding nucleotide sequence: SEQ ID NO: 472).

[1042] Spots 36α, 37α:

[1043] The amino acid sequences set forth in SEQ ID NOs: 480 to 483 were detected by the mass spectrometry. The protein identified from this mass data was seed maturation protein PM34 (NCBI accession number NP_001238285.1, amino acid sequence: SEQ ID NO: 479, encoding nucleotide sequence: SEQ ID NO: 478).

[1044] The amino acid sequences set forth in SEQ ID NOs: 486, 487 were detected by the mass spectrometry. The protein identified from this mass data was uncharacterized protein LOC100809384 (NCBI accession number NP_001241158.1, amino acid sequence: SEQ ID NO: 485, encoding nucleotide sequence: SEQ ID NO: 484).

[1045] The amino acid sequences set forth in SEQ ID NOs: 490 to 493 were detected by the mass spectrometry. The protein identified from this mass data was hypothetical protein GLYMA_10G155300 (NCBI accession number KRH33956.1, amino acid sequence: SEQ ID NO: 489, encoding nucleotide sequence: SEQ ID NO: 488).

[1046] Spot 38α

[1047] The amino acid sequences set forth in SEQ ID NOs: 496 to 513 were detected by the mass spectrometry. The protein identified from this mass data was seed biotin-containing protein SBP65-like isoform X1 (NCBI accession number XP_003526237.1, amino acid sequence: SEQ ID NO: 495, encoding nucleotide sequence: SEQ ID NO: 494).

[1048] Spot 39α:

[1049] The amino acid sequence set forth in SEQ ID NO: 516 was detected by the mass spectrometry. The protein identified from this mass data was ATP synthase subunit O, mitochondrial-like (NCBI accession number XP_003546884.1, amino acid sequence: SEQ ID NO: 515, encoding nucleotide sequence: SEQ ID NO: 514).

[1050] Spots 40α, 56α:

[1051] The amino acid sequences set forth in SEQ ID NOs: 519, 520 were detected by the mass spectrometry. The protein identified from this mass data was P24 oleosin isoform A (NCBI accession number XP_003553822.1, amino acid sequence: SEQ ID NO: 518, encoding nucleotide sequence: SEQ ID NO: 517).

[1052] Spot 41α:

[1053] The amino acid sequence set forth in SEQ ID NO: 523 was detected by the mass spectrometry. The protein identified from this mass data was uncharacterized protein At3g49720-like isoform X2 (NCBI accession number XP_006600908.1, amino acid sequence: SEQ ID NO: 522, encoding nucleotide sequence: SEQ ID NO: 521).

[1054] Spots 42α, 43α

[1055] The amino acid sequences set forth in SEQ ID NOs: 526 to 531 were detected by the mass spectrometry. The protein identified from this mass data was superoxide dismutase [Mn], mitochondrial (NCBI accession number XP_003526813.1, amino acid sequence: SEQ ID NO: 525, encoding nucleotide sequence: SEQ ID NO: 524).

[1056] The amino acid sequences set forth in SEQ ID NOs: 534 to 539 were detected by the mass spectrometry. The protein identified from this mass data was hypothetical protein GLYMA_04G221300 (NCBI accession number KRH64185.1, amino acid sequence: SEQ ID NO: 533, encoding nucleotide sequence: SEQ ID NO: 532).

[1057] Spot 44α:

[1058] The amino acid sequences set forth in SEQ ID NOs: 54 to 61 were detected by the mass spectrometry, as in Spot 7 of Example 3. The protein identified from this mass data was Ferritin-2 (UniProt accession number Q94IC4, amino acid sequence: SEQ ID NO: 14, encoding nucleotide sequence: SEQ ID NO: 13).

[1059] Spot 45α:

[1060] The amino acid sequences set forth in SEQ ID NOs: 542 to 545 were detected by the mass spectrometry. The protein identified from this mass data was uncharacterized protein LOC100499771 (NCBI accession number NP_001235797.1, amino acid sequence: SEQ ID NO: 541, encoding nucleotide sequence: SEQ ID NO: 540).

[1061] The amino acid sequences set forth in SEQ ID NOs: 548 to 551 were detected by the mass spectrometry. The protein identified from this mass data was hypothetical protein GLYMA_09G192800 (NCBI accession number KRH39322.1, amino acid sequence: SEQ ID NO: 547, encoding nucleotide sequence: SEQ ID NO: 546).

[1062] Spot 46α:

[1063] The amino acid sequence set forth in SEQ ID NO: 554 was detected by the mass spectrometry. The protein identified from this mass data was seed maturation protein PM22 (NCBI accession number NP_001237935.1, amino acid sequence: SEQ ID NO: 553, encoding nucleotide sequence: SEQ ID NO: 552).

[1064] Spot 47α:

[1065] The amino acid sequences set forth in SEQ ID NOs: 557, 558 were detected by the mass spectrometry. The protein identified from this mass data was eukaryotic translation initiation factor 5αA-2 (NCBI accession number XP_003549690.1, amino acid sequence: SEQ ID NO: 556, encoding nucleotide sequence: SEQ ID NO: 555).

[1066] The amino acid sequences set forth in SEQ ID NOs: 561 to 563 were detected by the mass spectrometry. The protein identified from this mass data was uncharacterized protein LOC100305510 (NCBI accession number NP_001236395.1, amino acid sequence: SEQ ID NO: 560, encoding nucleotide sequence: SEQ ID NO: 559).

[1067] Spot 48α:

[1068] The amino acid sequences set forth in SEQ ID NOs: 566 to 570 were detected by the mass spectrometry. The protein identified from this mass data was uncharacterized protein LOC100306570 (NCBI accession number NP_001236895.1, amino acid sequence: SEQ ID NO: 565, encoding nucleotide sequence: SEQ ID NO: 564).

[1069] Spot 49α:

[1070] The amino acid sequences set forth in SEQ ID NOs: 17 to 20 were detected by the mass spectrometry, as in Spot 1 of Example 3. The protein identified from this mass data was Bowman-Birk type proteinase inhibitor D-II (UniProt accession number P01064, amino acid sequence: SEQ ID NO: 2, encoding nucleotide sequence: SEQ ID NO: 1).

[1071] Spot 50α:

[1072] The amino acid sequences set forth in SEQ ID NOs: 573 to 576 were detected by the mass spectrometry. The protein identified from this mass data was uncharacterized protein LOC100813859 (NCBI accession number NP_001239816.1, amino acid sequence: SEQ ID NO: 572, encoding nucleotide sequence: SEQ ID NO: 571).

[1073] Spot 51α:

[1074] The amino acid sequences set forth in SEQ ID NOs: 579 to 582 were detected by the mass spectrometry. The protein identified from this mass data was 14-3-3-like protein (NCBI accession number XP_003526571.1, amino acid sequence: SEQ ID NO: 578, encoding nucleotide sequence: SEQ ID NO: 577).

[1075] Spot 52α:

[1076] The amino acid sequences set forth in SEQ ID NOs: 585 to 588 were detected by the mass spectrometry. The protein identified from this mass data was probable fructokinase-4 (NCBI accession number XP_003543564.1, amino acid sequence: SEQ ID NO: 584, encoding nucleotide sequence: SEQ ID NO: 583).

[1077] Spot 53α:

[1078] The amino acid sequences set forth in SEQ ID NOs: 591 to 597 were detected by the mass spectrometry. The protein identified from this mass data was triosephosphate isomerase isoform X1 (NCBI accession number XP_006593480.2, amino acid sequence: SEQ ID NO: 590, encoding nucleotide sequence: SEQ ID NO: 589).

[1079] The amino acid sequences set forth in SEQ ID NOs: 600 to 604 were detected by the mass spectrometry. The protein identified from this mass data was triosephosphate isomerase, cytosolic (NCBI accession number XP_003547334.1, amino acid sequence: SEQ ID NO: 599, encoding nucleotide sequence: SEQ ID NO: 598).

[1080] Spot 54α:

[1081] The amino acid sequences set forth in SEQ ID NOs: 607 to 611 were detected by the mass spectrometry. The protein identified from this mass data was superoxide dismutase [Fe], chloroplastic isoform X1 (NCBI accession number XP_014627751.1, amino acid sequence: SEQ ID NO: 606, encoding nucleotide sequence: SEQ ID NO: 605).

[1082] The amino acid sequences set forth in SEQ ID NOs: 614 to 616 were detected by the mass spectrometry. The protein identified from this mass data was iron-superoxide dismutase (NCBI accession number NP_001237901.1, amino acid sequence: SEQ ID NO: 613, encoding nucleotide sequence: SEQ ID NO: 612).

[1083] Spot 55α:

[1084] The amino acid sequences set forth in SEQ ID NOs: 619 to 635 were detected by the mass spectrometry. The protein identified from this mass data was 51 kDa seed maturation protein precursor (NCBI accession number NP_001238138.1, amino acid sequence: SEQ ID NO: 618, encoding nucleotide sequence: SEQ ID NO: 617).

[1085] The amino acid sequences set forth in SEQ ID NOs: 638 to 649 were detected by the mass spectrometry. The protein identified from this mass data was Lea protein precursor (NCBI accession number NP_001238201.1, amino acid sequence: SEQ ID NO: 637, encoding nucleotide sequence: SEQ ID NO: 636).

### INDUSTRIAL APPLICABILITY

[1086] The present invention can provide novel antigens of an allergy to soybean, methods and kits for diagnosing an allergy to soybean, pharmaceutical compositions comprising such an antigen, and soybeans or processed products of soybean in which such an antigen is eliminated or reduced.

The application's sequence listing, which the Patent Office published only in electronic form, follows.

SEQUENCE LISTING (649 sequences)

SEQ ID NO: 1 - DNA, 249 bp, Glycine max
  CDS (1)..(249)
atgtgtattctgagcttcctcaaaagtgatcagtcatcaagttatgatgatgatgagtattcaaaaccatgctgtgatctctgcatgtgcacacgctcaatgcctcctcaatgcagctgtgaagatattaggctgaattcatgccactcagattgtaagagctgtatgtgcacacgctcacagccaggacagtgtcgttgtcttgacaccaacgacttctgctacaaaccttgcaagtccagagatgac

SEQ ID NO: 2 - protein, 83 aa, Glycine max
MCILSFLKSDQSSSYDDDEYSKPCCDLCMCTRSMPPQCSCEDIRLNSCHSDCKSCMCTRSQPGQCRCLDTNDFCYKPCKSRDD

SEQ ID NO: 3 - DNA, 1425 bp, Glycine max
  CDS (1)..(1425)
atgtcaccacaaacagagactaaagcaagtgttgggttcaaagctggtgttaaagattataaattgacttattatactcctgactatgaaaccaaagatactgatatcttggcagcattccgagtaactcctcaaccaggagttccgcctgaagaagcaggtgccgcggtagccgccgaatcttctactggtacatggacaactgtgtggaccgatgggcttaccagtcttgatcgttacaaagggcgatgctacggccttgaacctgttgctggggaagaaaatcaatatattgcttatgtagcttatcccttagacctttttgaagaaggttctgttactaacatgtttacttccattgtcggtaatgtatttgggttcaaggccctgcgtgctctacgtctggaggatttgcgaatccctactgcttatattaaaactttccaaggtccgcctcatggcatccaagttgagagagataaattgaacaagtatggtcgtcccctattaggatgtactattaaacctaaattggggttatccgctaagaattatggtagagctgtttatgaatgtcttcgtgggggacttgattttaccaaagatgatgaaaatgtgaattcccaaccatttatgcgttggagagaccgtttcttattttgtgccgaagccatttttaaatcacaggctgaaacaggtgaaatcaaagggcattacttgaatgcaactgcgggtacatgcgaagaaatgatgaaaagagctgtatttgccagagaattaggcgttcctatcgtaatgcatgattatttaacggggggattcactgcaaatactagcttggctcattattgccgagataatggtctacttcttcatatacaccgtgcaatgcatgcagttatcgacagacaaaagaatcatggtatgcactttcgtgtactagctaaagcattacgtttgtctggtggagatcatgttcacgccggtaccgtagtaggtaaacttgaaggggaaagagaaatcactttaggttttgttgatttactacgtgatgattttgttgaaaaagatcgaagtcgcggtatttatttcactcaggattgggtttctctaccaggtgttttgcctgtagcttcgggaggtattcacgtttggcatatgcctgctctgaccgagatctttggggatgattctgtactccaatttggcggaggaactttaggacacccttggggaaatgcaccaggtgctgtagctaatcgagtagctcttgaagcatgtgtgcaggctcgaaatgaaggacgcgatcttgctcgtgaaggtaatgaaattatccgtgaggctagcaaatggagtcctgaattagctgctgcttgtgaagtatggaaggagatcaaatttgaattcgaagcaatggatactttg

SEQ ID NO: 4 - protein, 475 aa, Glycine max
MSPQTETKASVGFKAGVKDYKLTYYTPDYETKDTDILAAFRVTPQPGVPPEEAGAAVAAESSTGTWTTVWTDGLTSLDRYKGRCYGLEPVAGEENQYIAYVAYPLDLFEEGSVTNMFTSIVGNVFGFKALRALRLEDLRIPTAYIKTFQGPPHGIQVERDKLNKYGRPLLGCTIKPKLGLSAKNYGRAVYECLRGGLDFTKDDENVNSQPFMRWRDRFLFCAEAIFKSQAETGEIKGHYLNATAGTCEEMMKRAVFARELGVPIVMHDYLTGGFTANTSLAHYCRDNGLLLHIHRAMHAVIDRQKNHGMHFRVLAKALRLSGGDHVHAGTVVGKLEGEREITLGFVDLLRDDFVEKDRSRGIYFTQDWVSLPGVLPVASGGIHVWHMPALTEIFGDDSVLQFGGGTLGHPWGNAPGAVANRVALEACVQARNEGRDLAREGNEIIREASKWSPELAAACEVWKEIKFEFEAMDTL

SEQ ID NO: 5 - DNA, 1026 bp, Glycine max
  CDS (1)..(1026)
atgccaaacgacagcgttctgagtcttttcttcttcgttaccctcttcacatgccttctctctgctacttcccacgatgaccatattttcctaccgagtcaactccatgacgatgactcagtgagttgcactgcaaccgacccaagccttaactacaagccggtgatcggaatcctgacccaccccggcgacggtgcctctggccggctcagcaacgccaccggggtttcttacatcgccgcctcctacgttaaattcgtggagtccggtggtgctagagttattccccttatctacaatgagtcacctgagaaccttaacaagaagctcgatttggtcaatggagtgctcttcactggtgggtgggctgtttctggtccatatttggatactcttggaaacatttttaagaaagctttagagagaaatgatgctggagaccatttcccagtaattgccttcaacttaggtggaaacctcgtaataaggatcgtaagcgagcaaactgatattcttgaaccatttactgcgtcgagtttgccaagttctcttgtattgtggaacgaagcaaatgctaaaggaagtctatttcaaagatttccttcagatttgttgacacagctgaagacagattgtctcgtcctgcacaatcatcgttatgccatatccccacgcaagcttcaatataataccaagttatctgacttttttgagattctggcaacatctggggatagagatggaaagactttcgtttccacagcacgtggtaggaaatatcccgtgactgtcaacctatggcaaccagagaaaaatgcgtttgagtgggctacatctttgaaagcccctcacacagaggatgcaattcgggttactcagtccacagcaaactttttcataagtgaagctaggaaatccacaaacacacctgatgctcaaaaagtgcgagatagtctcatctacaattacaaacctacttttggtggaacggctgggaaaggatatgatcaagtgtatctctttgaa

SEQ ID NO: 6 - protein, 342 aa, Glycine max
MPNDSVLSLFFFVTLFTCLLSATSHDDHIFLPSQLHDDDSVSCTATDPSLNYKPVIGILTHPGDGASGRLSNATGVSYIAASYVKFVESGGARVIPLIYNESPENLNKKLDLVNGVLFTGGWAVSGPYLDTLGNIFKKALERNDAGDHFPVIAFNLGGNLVIRIVSEQTDILEPFTASSLPSSLVLWNEANAKGSLFQRFPSDLLTQLKTDCLVLHNHRYAISPRKLQYNTKLSDFFEILATSGDRDGKTFVSTARGRKYPVTVNLWQPEKNAFEWATSLKAPHTEDAIRVTQSTANFFISEARKSTNTPDAQKVRDSLIYNYKPTFGGTAGKGYDQVYLFE

SEQ ID NO: 7 - DNA, 975 bp, Glycine max
  CDS (1)..(975)
atggcggaaggactcgtcctgaagggaaccatgcgcgcccacaccgacgtcgtgacggcgattgccactcccatcgacaactccgacatgatcgtgacggcgtcgcgcgacagatccatcattctctggcacctcaccaaggaggacaagacctacggtgtcccccgccgccgcctcaccggacattctcacttcgtccaggacgtcgtcctctcatccgacggtcagttcgccctctccggctcctgggacggcgagctccgcctctgggacctcgcggctggcacctctgcccgccgcttcgttggccacaccaaggacgtgctctccgtggcgttctccatcgacaaccgtcagatcgtgtcggcctctcgtgaccgcacgatcaagctgtggaacaccctgggtgagtgcaagtacacaatccaagatggcgatgcgcattcggattgggtaagttgcgtccgtttcagccctagcactcttcagccaaccattgtttctgcttcatgggacaggaccgttaaggtttggaacctgaccaactgcaagctgaggaacacccttgctggacacaatgggtatgtgaatactgttgctgtttcccctgatggctctctctgtgccagtggtggcaaagatggggttattcttctgtgggatttggctgagggtaagcgtctttactctctcgatgctggctcaatcatccatgcactctgcttcagccccagcaggtactggctctgcgccgccaccgagcagagcatcaagatctgggatttggagagcaagagtatcgttgaggatttgaaggttgacctcaagactgaggctgatgccacctccggtggtggtaacgccaacaagaagaaggttatttattgcacaagtttgaactggagtgcggatggaagcactttgtttagtggctataccgatggtgtggccagagtttgggctattggacgttat

SEQ ID NO: 8 - protein, 325 aa, Glycine max
MAEGLVLKGTMRAHTDVVTAIATPIDNSDMIVTASRDRSIILWHLTKEDKTYGVPRRRLTGHSHFVQDVVLSSDGQFALSGSWDGELRLWDLAAGTSARRFVGHTKDVLSVAFSIDNRQIVSASRDRTIKLWNTLGECKYTIQDGDAHSDWVSCVRFSPSTLQPTIVSASWDRTVKVWNLTNCKLRNTLAGHNGYVNTVAVSPDGSLCASGGKDGVILLWDLAEGKRLYSLDAGSIIHALCFSPSRYWLCAATEQSIKIWDLESKSIVEDLKVDLKTEADATSGGGNANKKKVIYCTSLNWSADGSTLFSGYTDGVARVWAIGRY

SEQ ID NO: 9 - DNA, 303 bp, Glycine max
  CDS (1)..(303)
atggcatctcatcaacaaaacaagcaagagcttgatgaaagggcaaggcaaggagagactgttgttccgggtggcactggtggcaagagccttgaggctcagcaacatcttgctgaaggaaggagcaggggagggaaaacaaggaaggagcagctggggacagaagggtaccatgaaatgggacgcaaaggtgggttgagcactatggacaagtcaggagaagaacgtgctcaagaggaagccattgacatcgatgagtccaagttcaggactggtaataaccaagacaagaaccagaacaag

SEQ ID NO: 10 - protein, 101 aa, Glycine max
MASHQQNKQELDERARQGETVVPGGTGGKSLEAQQHLAEGRSRGGKTRKEQLGTEGYHEMGRKGGLSTMDKSGEERAQEEAIDIDESKFRTGNNQDKNQNK

SEQ ID NO: 11 - DNA, 1929 bp, Glycine max
  CDS (1)..(1929)
atggcgtctgaacaattggctcgcagagagaacaccaccaccgagaaggagattcacgttgagaaacacagggttcccaagatggccacccacttcgagcaccttgcggagcaagctaaagaatctgacatcaccgctgggaaggatactccgcagggtagcatagaagccttgcaagctggagagagggtcaaagatcatgcaggaaaagccatgggagatattggtggacgtgggaaagccagagagactcacgagctgggtgcacactttgaatccctggctgacaaagtaactgaccatgcagcagccaatgtagttggaaacaaagagagtcaaagagaagctcgtggtggtgttcgtgatgttgggaagttcgaaatgagaactgaagggggagaaaaaggaaacaaggatagaccagaactgaaaacacgaaccagagaggtaataggaagaacggagaaagaaagaggaagagaaagtggaggacaagtagtggcagagaaaggaagagaaacagaaactgcaaggggaagggttggtgctgaaaatgaaggtgcaagaacaaccgctgttataacttgcacgttggaaaaaggtggtggtactcagaaaccaataagagaagaagagagagagagtgaaagtgaaagatcagcgtgggaacagatttccaactacagtgatcaagccacacaaggtgtgaaggaaaagtacgagagagcaaagcaagcagcaagcgagacactgaacaccacaacacaaaccgcacaagagaaaagcgcacaggcaaagaatcttgcagcacaagcaaaggacgcaacgttagagaagggtcagcaaggctatgctgtgacaaaggacaccatttcaagtgcagcgaaaaccgcttcggagaaaactgcgccagtggcagagaaggccaaagactacactcttcaggctgcggagaaggccaagagtgcgggtggcacaacggcgagttacgtcggagagaaagcggtgcaggccaaggatgtcgccgtggagagtgggaagagtgcggctgggtatgctgccaaggtggctgctgatttgagggacaaggccaccgcggtggggtgggccgcggcccatttttcggcggaaaagacggtggaagggaccaaggccgccgcccatgttgtcgagggagcggccgggtatgccggacataaggccgcggagcttgcttcgatgtcggccggtgctgttaaagggctggctgcttctgctggtgagactgctaaggaatacaccgcaaagaagaaagaggaggcacagcgggaattggaggccaaaaaaccatctcaacctcaggaagctgaagagaggccatcagaaggaattggcgaaactgtgaggcagtatgcacaaaaaccaaagccaagtgaaggaaaccctcagaaggagggaaccggaagcatcgtgtttacagcaataggcgaaacagtaagcagtgccggtgagaaggtaaagaaaccgtttaaaaacactatgggaggagaaagtgaaggaggaggagggaaagaagagggaaagagtgtcattggtaaaagtttgaccagcattggtgagaagctgggtgatgcaaaacagagagaggagctgttagacaacgtcactggcaacatcaccgagggaggaggcgaggtgttgggagcagtaggtgaaaccgttgctgagattggacagaacatgatgaagccagcggagatagttcaggaacgcgctcacgttcgacaagcgggtggggtcttggatgccattggtgaaaccattgctgagattgctgaaacgactcgagtcatggtttctggagaggacgagagagtgctgaggcagagcgtggtgttggagactcgcgtaactggtcgtgccaagcatgaagaagggtcgcacggtgct

SEQ ID NO: 12 - protein, 643 aa, Glycine max
MASEQLARRENTTTEKEIHVEKHRVPKMATHFEHLAEQAKESDITAGKDTPQGSIEALQAGERVKDHAGKAMGDIGGRGKARETHELGAHFESLADKVTDHAAANVVGNKESQREARGGVRDVGKFEMRTEGGEKGNKDRPELKTRTREVIGRTEKERGRESGGQVVAEKGRETETARGRVGAENEGARTTAVITCTLEKGGGTQKPIREEERESESERSAWEQISNYSDQATQGVKEKYERAKQAASETLNTTTQTAQEKSAQAKNLAAQAKDATLEKGQQGYAVTKDTISSAAKTASEKTAPVAEKAKDYTLQAAEKAKSAGGTTASYVGEKAVQAKDVAVESGKSAAGYAAKVAADLRDKATAVGWAAAHFSAEKTVEGTKAAAHVVEGAAGYAGHKAAELASMSAGAVKGLAASAGETAKEYTAKKKEEAQRELEAKKPSQPQEAEERPSEGIGETVRQYAQKPKPSEGNPQKEGTGSIVFTAIGETVSSAGEKVKKPFKNTMGGESEGGGGKEEGKSVIGKSLTSIGEKLGDAKQREELLDNVTGNITEGGGEVLGAVGETVAEIGQNMMKPAEIVQERAHVRQAGGVLDAIGETIAEIAETTRVMVSGEDERVLRQSVVLETRVTGRAKHEEGSHGA

SEQ ID NO: 13 - DNA, 771 bp, Glycine max
  CDS (1)..(771)
  misc_feature (242)..(242): n is a, c, g, or t
atggccctttcttgctccaaagttttaagcttttatctctcgcccgttgtgggtggtggtgatgttccgaaaaagctcactttttcttcttttttgggtctttctaagggtgttggtggaagcaggagctcgagggtgtgtgctgcttcaaatgcacccgcaccactcgctggggtcatatttgaaccatttcaagagctcaagaaggattatcttgctgttccgattgcacacaatgtttncttggctcgtcagaactatgcagatgactctgaatctgcaatcaacgagcagatcaatgtggaatacaacgtttcctatgtgtaccacgccttgtttgcgtacttcgacagagacaacatagctctcaaaggacttgcaaagttcttcaaggaatcaagtgaagaagaaagagagcatgccgagcagcttataaagtatcagaacattcgtggtggacgagtggtgctgcacccaatcacaagtcctccctcggaatttgagcattcggaaaaaggggatgccttgtatgccatggaactagctttgtctttggagaagttgacgaatgagaaacttctgcacgttcacagtgtggcagaacgtaacaatgatcctcaaytdgcagacttcattgagagcgagttcttgtatgagcaggttaaatcgattaaaaagattgcagagtatgtggctcaactgagattagttggaaagggtcatggtgtgtggcactttgatcaaaagcttcttcacgatgaagatcatgta

SEQ ID NO: 14 - protein, 257 aa, Glycine max
  misc_feature (81)..(81): The 'Xaa' at location 81 stands for Tyr, Cys, Ser, or Phe.
  misc_feature (208)..(208): The 'Xaa' at location 208 stands for Leu, or Phe.
MALSCSKVLSFYLSPVVGGGDVPKKLTFSSFLGLSKGVGGSRSSRVCAASNAPAPLAGVIFEPFQELKKDYLAVPIAHNVXLARQNYADDSESAINEQINVEYNVSYVYHALFAYFDRDNIALKGLAKFFKESSEEEREHAEQLIKYQNIRGGRVVLHPITSPPSEFEHSEKGDALYAMELALSLEKLTNEKLLHVHSVAERNNDPQXADFIESEFLYEQVKSIKKIAEYVAQLRLVGKGHGVWHFDQKLLHDEDHV

SEQ ID NO: 15 - DNA, 2421 bp, Glycine max
  CDS (1)..(2421)
atgtctcagcaaggcgaatcatcggacccgaaatcggggaagaaggacttctcaaccgcgattctggaacgcaaaaagtcgccgaaccggcttgtcgtggatgaggctgtcaacgacgacaactccgtggtcaccatgcatccccaaaccatggaaaagcttcagcttttccgaggggacactatcctcatcaagggtaagaaacggaaggataccatttgcatagctcttgctgatgagaactgtgaggagccgaagatcaggatgaataaagttgtgaggtcaaatttgcgggttcggcttggagatgttgtgtctgtgcaccagtgcccggatgttaaatatgggaaacgtgtgcacattctgcctattgatgataccattgaaggtgtcactggcaatctgtttgatgctttcttgaaaccctatttcttggaagcttaccgtcctgtcagaaaaggagatctatttcttgtccggggagggatgagaagtgtagagttcaaggtggttgaaaccgatcctggagaatattgtgttgttgctccagacactgaaattttctgtgagggggagcctttgaaaagagaagatgaagagagactggatgaagtcgggtatgatgatgtgggtggtgtcaggaaacaaatggctcagattcgtgagttggttgagcttccattgaggcatccacagctttttaaatcaattggtgtgaaaccacccaaaggaattttactttatggacccccaggttctgggaagacattaatagcaagagctgtagctaatgaaactggagcttttttcttttgtattaacggaccagagattatgtccaaacttgctggagagagtgaaagcaatctcaggaaagcgtttgaagaagcagaaaagaatgcaccatccattatcttcattgatgaaattgattccattgcccccaagcgggagaagacacatggtgaagttgaaaggaggattgtttcacaacttttgactcttatggatggattaaaatctcgtgctcatgttattgttattggagctactaatcgtccaaatagcattgacccagcattgagaaggtttggtagatttgatagggaaattgatattggtgttcccgatgaagttgggagacttgaagtccttcgcatacatactaaaaacatgaagctatctgatgatgttgatttagagagaattgcaaaagatactcatgggtatgttggtgctgaccttgctgccctttgcactgaagctgctttgcaatgcattagggagaagatggatgtaattgacttggaggatgagactattgatgcagaagtactgaattccatggcagttacaaatgagcatttccagactgcccttggaacaagcaacccatcagctttacgtgaaactgttgttgaagtgcctaatgtcagctgggaagacattggaggccttgaaaatgtcaagcgtgaactgcaagagactgtacaatatccagttgagcacccagaaaagtttgagaagtttggtatgtctccatctaaaggagtacttttctatggtcctccaggatgtgggaaaactttgttagccaaagcaattgctaatgaatgtcaagctaacttcatcagtgtgaaaggtccagaattgcttacaatgtggtttggtgaaagtgaagctaatgttagagaaatttttgacaaggccagacaatcggctccatgtgtcctcttctttgatgagcttgactctattgccactcagagaggaagcagtgttggggatgctggtggtgcggctgatagagttctaaatcaacttttgactgaaatggatggcatgtctgccaaaaagactgtgttcataattggggcaactaacagacctgacatcattgacccagcacttcttcgaccaggccgtctggatcaattgatctatattcctctccctgatgaggattcccggcatcaaatctttaaagcctgcttgaggaagtcacctatcgcaaaaaatgttgatttgagagcattggctaggcacactcaagggttcagtggtgctgatattacagaaatatgccagcgagcatgcaaatatgccataagagaaaacatagagaaggacattgagcgagagaggaagagtagggaaaaccctgaggccatggatgaagataccgtcgacgacgaagttgcggagatcaaggctgctcattttgaggagtcaatgaagtttgcacggaggagtgttagtgatgctgatattcgcaagtatcaggcatttgctcagaccttacagcaatcaagagggtttggaagtgaatttaggtttccagagtctggagataggactactactggatctgacccctttgcagcttctgctggtggggctgacgaagatgatctatatagt

SEQ ID NO: 16 - protein, 807 aa, Glycine max
MSQQGESSDPKSGKKDFSTAILERKKSPNRLVVDEAVNDDNSVVTMHPQTMEKLQLFRGDTILIKGKKRKDTICIALADENCEEPKIRMNKVVRSNLRVRLGDVVSVHQCPDVKYGKRVHILPIDDTIEGVTGNLFDAFLKPYFLEAYRPVRKGDLFLVRGGMRSVEFKVVETDPGEYCVVAPDTEIFCEGEPLKREDEERLDEVGYDDVGGVRKQMAQIRELVELPLRHPQLFKSIGVKPPKGILLYGPPGSGKTLIARAVANETGAFFFCINGPEIMSKLAGESESNLRKAFEEAEKNAPSIIFIDEIDSIAPKREKTHGEVERRIVSQLLTLMDGLKSRAHVIVIGATNRPNSIDPALRRFGRFDREIDIGVPDEVGRLEVLRIHTKNMKLSDDVDLERIAKDTHGYVGADLAALCTEAALQCIREKMDVIDLEDETIDAEVLNSMAVTNEHFQTALGTSNPSALRETVVEVPNVSWEDIGGLENVKRELQETVQYPVEHPEKFEKFGMSPSKGVLFYGPPGCGKTLLAKAIANECQANFISVKGPELLTMWFGESEANVREIFDKARQSAPCVLFFDELDSIATQRGSSVGDAGGAADRVLNQLLTEMDGMSAKKTVFIIGATNRPDIIDPALLRPGRLDQLIYIPLPDEDSRHQIFKACLRKSPIAKNVDLRALARHTQGFSGADITEICQRACKYAIRENIEKDIERERKSRENPEAMDEDTVDDEVAEIKAAHFEESMKFARRSVSDADIRKYQAFAQTLQQSRGFGSEFRFPESGDRTTTGSDPFAASAGGADEDDLYS

SEQ ID NO: 17 - protein, 13 aa, Glycine max
DQSSSYDDDEYSK

SEQ ID NO: 18 - protein, 15 aa, Glycine max
KSDQSSSYDDDEYSK

SEQ ID NO: 19 - protein, 14 aa, Glycine max
SDQSSSYDDDEYSK

SEQ ID NO: 20 - protein, 9 aa, Glycine max
SYDDDEYSK

SEQ ID NO: 21 - protein, 18 aa, Glycine max
ALRALRLEDLRIPTAYIK

SEQ ID NO: 22 - protein, 18 aa, Glycine max
ALRLSGGDHVHAGTVVGK

SEQ ID NO: 23 - protein, 22 aa, Glycine max
LEGEREITLGFVDLLRDDFVEK

SEQ ID NO: 24 - protein, 14 aa, Glycine max
LRLEDLRIPTAYIK

SEQ ID NO: 25 - protein, 11 aa, Glycine max
LTYYTPDYETK

SEQ ID NO: 26 - protein, 11 aa, Glycine max
TDGLTSLDRYK

SEQ ID NO: 27 - protein, 14 aa, Glycine max
TFQGPPHGIQVERD

SEQ ID NO: 28 - protein, 15 aa, Glycine max
TFQGPPHGIQVERDK

SEQ ID NO: 29 - protein, 24 aa, Glycine max
APHTEDAIRVTQSTANFFISEARK

SEQ ID NO: 30 - protein, 23 aa, Glycine max
FVESGGARVIPLIYNESPENLNK

SEQ ID NO: 31 - protein, 7 aa, Glycine max
IWDLESK

SEQ ID NO: 32 - protein, 7 aa, Glycine max
SIVEDLK

SEQ ID NO: 33 - protein, 21 aa, Glycine max
QELDERARQGETVVPGGTGGK

SEQ ID NO: 34 - protein, 17 aa, Glycine max
SGEERAQEEAIDIDESK

SEQ ID NO: 35 - protein, 16 aa, Glycine max
AAAHVVEGAAGYAGHK

SEQ ID NO: 36 - protein, 11 aa, Glycine max
AKDYTLQAAEK

SEQ ID NO: 37 - protein, 17 aa, Glycine max
ARETHELGAHFESLADK

SEQ ID NO: 38 - protein, 15 aa, Glycine max
ATAVGWAAAHFSAEK

SEQ ID NO: 39 - protein, 17 aa, Glycine max
DTPQGSIEALQAGERVK

SEQ ID NO: 40 - protein, 9 aa, Glycine max
DYTLQAAEK

SEQ ID NO: 41 - protein, 10 aa, Glycine max
EEAQRELEAK

SEQ ID NO: 42 - protein, 21 aa, Glycine max
EGTGSIVFTAIGETVSSAGEK

SEQ ID NO: 43 - protein, 14 aa, Glycine max
ERGRESGGQVVAEK

SEQ ID NO: 44 - protein, 11 aa, Glycine max
GLAASAGETAK

SEQ ID NO: 45 - protein, 9 aa, Glycine max
GQQGYAVTK

SEQ ID NO: 46 - protein, 26 aa, Glycine max
KPSQPQEAEERPSEGIGETVRQYAQK

SEQ ID NO: 47 - protein, 8 aa, Glycine max
PAEIVQER

SEQ ID NO: 48 - protein, 15 aa, Glycine max
PQGSIEALQAGERVK

SEQ ID NO: 49 - protein, 17 aa, Glycine max
QAASETLNTTTQTAQEK

SEQ ID NO: 50 - protein, 13 aa, Glycine max
SAGGTTASYVGEK

SEQ ID NO: 51 - protein, 8 aa, Glycine max
SLTSIGEK

SEQ ID NO: 52 - protein, 16 aa, Glycine max
TPQGSIEALQAGERVK

SEQ ID NO: 53 - protein, 13 aa, Glycine max
VTDHAAANVVGNK

SEQ ID NO: 54 - protein, 22 aa, Glycine max
AASNAPAPLAGVIFEPFQELKK

SEQ ID NO: 55 - protein, 21 aa, Glycine max
ASNAPAPLAGVIFEPFQELKK

SEQ ID NO: 56 - protein, 18 aa, Glycine max
FFKESSEEEREHAEQLIK

SEQ ID NO: 57 - protein, 10 aa, Glycine max
GHGVWHFDQK

SEQ ID NO: 58 - protein, 13 aa, Glycine max
IAEYVAQLRLVGK

SEQ ID NO: 59 - protein, 14 aa, Glycine max
KIAEYVAQLRLVGK

SEQ ID NO: 60 - protein, 8 aa, Glycine max
LLHDEDHV

SEQ ID NO: 61 - protein, 20 aa, Glycine max
SNAPAPLAGVIFEPFQELKK

SEQ ID NO: 62 - protein, 10 aa, Glycine max
AGESESNLRK

SEQ ID NO: 63 - protein, 13 aa, Glycine max
GESEANVREIFDK

SEQ ID NO: 64 - protein, 12 aa, Glycine max
GILLYGPPGSGK

SEQ ID NO: 65 - protein, 11 aa, Glycine max
LAGESESNLRK

SEQ ID NO: 66 - protein, 12 aa, Glycine max
LSDDVDLERIAK

SEQ ID NO: 67 - protein, 16 aa, Glycine max
RELQETVQYPVEHPEK

SEQ ID NO: 68 - protein, 15 aa, Glycine max
TVFIIGATNRPDIID

SEQ ID NO: 69 - DNA, 2448 bp, Glycine max
  CDS (1)..(2448)
atgaggaagtggacggttgcttccgctctccttcttctctctctcctctttctctttgcagatcaaggtcgaaagtttcaggcgaatgccgagggagattccgacgagcttgtagatccacccaaggtggaggacaagatcggtgctgtgcctcatggcctttcaaccgattcagatgtcgtcaagagggaggcggagtcgatctcgaagagatctctccggagcaacgcggagaagtttgagttccaagcggaagtgtcgcggcttatggatatcatcatcaattctctctacagtaacaaggatatcttcctcagagagttgatttccaatgcttctgatgctttggacaagattaggttcctctccctcacggataaggaggtgttgggagaaggtgataacaccaagcttgatattcagattaagttggacaaggaaaagaaaattctctcaattcgagacagaggtatcggtatgacgaaggaggatttgataaagaatttggggacaatagcgaaatctggaacttctgcatttgttgagaagatgcaaacaagtggagatctcaatctgattgggcagtttggagtcggcttctactctgtttatcttgtggccgactatgtcgaagttattagcaagaataacgatgataagcagtatgtatgggaatcaaaagctgatggagcattcgctatttcagaagatacatggaatgaaccacttggacgaggaactgagattagattacacctcaaggaagaggctggggaatacttggaggagtctaaactgaaagaattggtgaagagatactctgaatttattaacttccctatctatatttgggcaagcaaagaagttgatgtggaggttcccgctgatgaagatgattccagtgatgaagaggattcatctgaaagcagctccaaggaggaaagcgaagatgaagatgctgataaaagtgaagatgaagaaaaaaagcctaagacaaagacagtgaaggaaacaacttatgagtgggaacttttaaatgatgtgaaagctatatggctgaggaatccaaaagaggttacagaagaagaatacaccaaattctaccactctcttgccaaggatttcagtgatgagaaacctttagcatggagtcatttcactgctgagggtgatgttgagttcaaggcagtcctgtttgtaccacctaaggcacctcaagatttatatgagagctattataacgcaaacaaatcgaacctgaagttgtatgttagacgtgtgttcatttcagatgaatttaatgaactgttgcccaagtacctaaactttttgctgggtcttgttgattctgacactttgccacttaatgtatcacgagaaatgcttcaacaacatagtagtctgaagacaatcaagaagaaacttattaggaaagcccttgatatgatccgcaggattgctgatgaggatcctgacgagtcaactgacaaagaaaagaaagatgcatcctctgacaatgatgagaagaaaggtcaatattctaagttctggaatgagtttggtaaatccattaaacttggtatcatcgaggatgccaccaacagaaatcgtttggcaaaactgctcagatttgagagcaccaagtctgagggtaaattgacatctctggatcagtacatatctagaatgaaaactgggcagaaggatatcttttacataactggaaccagcaaagaacaactggaaaactctcccttccttgagcggcttaagaagaaaaattttgaggttattttcttcacggatccagttgatgagtacttgatgcaatacctgatggattatgaagacaagaagttccaaaatgtgtccaaggagggtttgaaacttgggaaagattcaaaagacaaggaactgaaggaatcttttaaggatcttaccaagtggtggaaaactgctctttccaaagacaatgttgatgatgtgaagatttccaaccgattagataacactccttgtgtagtggtgacatcaaaatttggttggagtgctaacatggagagaatcatgcagtctcaaactttgtcagatgctagcaagcaagcatacatgcgcggcaagagggttcttgagatcaatcctaggcaccctattatcaaggagctccgagagagagtagtaaagaaccctgaggatgagggtgtgaagcatacagcacagctgatgtaccagactgcactctttgaaagcggcttcctgcttgatgatcccaaggattttgcttcccggatttatgattcagtgaagactagcctggacatcagtcctgaagcaacagttgaggaggaagatgacactgaagtagaggctgaaagtgacgcgaaagaagattcaaagcctgaaactgatgctgttaacgatgataatgatgtcaaggacgagttgtag

SEQ ID NO: 70 - protein, 815 aa, Glycine max
MRKWTVASALLLLSLLFLFADQGRKFQANAEGDSDELVDPPKVEDKIGAVPHGLSTDSDVVKREAESISKRSLRSNAEKFEFQAEVSRLMDIIINSLYSNKDIFLRELISNASDALDKIRFLSLTDKEVLGEGDNTKLDIQIKLDKEKKILSIRDRGIGMTKEDLIKNLGTIAKSGTSAFVEKMQTSGDLNLIGQFGVGFYSVYLVADYVEVISKNNDDKQYVWESKADGAFAISEDTWNEPLGRGTEIRLHLKEEAGEYLEESKLKELVKRYSEFINFPIYIWASKEVDVEVPADEDDSSDEEDSSESSSKEESEDEDADKSEDEEKKPKTKTVKETTYEWELLNDVKAIWLRNPKEVTEEEYTKFYHSLAKDFSDEKPLAWSHFTAEGDVEFKAVLFVPPKAPQDLYESYYNANKSNLKLYVRRVFISDEFNELLPKYLNFLLGLVDSDTLPLNVSREMLQQHSSLKTIKKKLIRKALDMIRRIADEDPDESTDKEKKDASSDNDEKKGQYSKFWNEFGKSIKLGIIEDATNRNRLAKLLRFESTKSEGKLTSLDQYISRMKTGQKDIFYITGTSKEQLENSPFLERLKKKNFEVIFFTDPVDEYLMQYLMDYEDKKFQNVSKEGLKLGKDSKDKELKESFKDLTKWWKTALSKDNVDDVKISNRLDNTPCVVVTSKFGWSANMERIMQSQTLSDASKQAYMRGKRVLEINPRHPIIKELRERVVKNPEDEGVKHTAQLMYQTALFESGFLLDDPKDFASRIYDSVKTSLDISPEATVEEEDDTEVEAESDAKEDSKPETDAVNDDNDVKDEL

SEQ ID NO: 71 - protein, 14 aa, Glycine max
APQDLYESYYNANK

SEQ ID NO: 72 - protein, 8 aa, Glycine max
AVLFVPPK

SEQ ID NO: 73 - protein, 11 aa, Glycine max
DFASRIYDSVK

SEQ ID NO: 74 - protein, 17 aa, Glycine max
DIFLRELISNASDALDK

SEQ ID NO: 75 - protein, 10 aa, Glycine max
DIFYITGTSK

SEQ ID NO: 76 - protein, 7 aa, Glycine max
DNVDDVK

SEQ ID NO: 77 - protein, 17 aa, Glycine max
EDSKPETDAVNDDNDVK

SEQ ID NO: 78 - protein, 11 aa, Glycine max
EEAGEYLEESK

SEQ ID NO: 79 - protein, 13 aa, Glycine max
EQLENSPFLERLK

SEQ ID NO: 80 - protein, 10 aa, Glycine max
EVLGEGDNTK

SEQ ID NO: 81 - protein, 9 aa, Glycine max
EVTEEEYTK

SEQ ID NO: 82 - protein, 7 aa, Glycine max
FYHSLAK

SEQ ID NO: 83 - protein, 16 aa, Glycine max
IGAVPHGLSTDSDVVK

SEQ ID NO: 84 - protein, 15 aa, Glycine max
LGIIEDATNRNRLAK

SEQ ID NO: 85 - protein, 8 aa, Glycine max
NPEDEGVK

SEQ ID NO: 86 - protein, 9 aa, Glycine max
SGTSAFVEK

SEQ ID NO: 87 - protein, 26 aa, Glycine max
TSLDISPEATVEEEDDTEVEAESDAK

SEQ ID NO: 88 - DNA, 2442 bp, Glycine max
  CDS (1)..(2442)
atgaggaagtggacggttgcttccgctctccttcttctctctctcctctttctctttgcagatcaaggtcgaaagtttcaggcgaatgccgagggagattccgacgagcttgtagatcctccgaaggtggaggacaagatcggtgctgtgcctcatggcctttccaccgattcagatgtcgtcaagagggagtcggagtcgatctcgaagagatctctccggagcaatgcggagaagtttgagttccaagcggaagtgtcacggcttatggatattatcatcaattctctctacagtaacaaggatatcttcctcagagagttgatttccaatgcttctgatgctttggacaagattaggttcctttccctcacggataaggacgttttgggagaaggtgataacaccaagcttgatattcagattaagttggacaaggaaaagaaaattctctcaattcgagacagaggtattggtatgacgaaggaggatttgataaagaatttggggacaatagcaaaatctggaacttctgcatttgttgagaagatgcaaacaagtggagatctcaatctgattgggcagtttggagtcggcttctactctgtttatctcgtggctgactatgtcgaagtcattagcaagaataatgatgataaacagtatgtatgggaatcaaaagctgatggagcatttgcaatttcagaagatacatggaatgaacctctagggcgtggaactgagattagattacacctcaaggaagaggctggggagtacttgcaggagtctaaactgaaagaattggtgaagagatactctgaatttattaacttccctatctatatttgggcaagcaaagaggttgatgtggaggttcccgctgatgaagatgattccagtgatgaagaggattcatctgaaagcagctccaaggaggaaagcgaagatgaagatgctgataaaagtgaagacgaagaaaaaaagcccaagacaaagacggtgaaggaaacaacttatgaatgggaacttttaaatgatgtgaaagctatatggctgaggaatccaaaggaggttacagaagaagaatacaccaaattctaccactctcttgccaaggatttcagtgatgagaaacctttagcatggagtcatttcactgctgagggcgatgtcgagttcaaggcagtcctgtttgtaccacctaaggcacctcaagatttatacgagagctattataacgcaaacaaatccaacctgaagttgtatgttagacgtgtgttcatttcagatgaatttaatgaactgttgcctaagtacctaaactttttgctgggtcttgttgattctgacacattgccacttaatgtatcgcgagaaatgcttcagcaacatagtagtctaaagacaatcaagaagaaacttattaggaaagcccttgatatgatccgtaggattgctgatgaggatcctgatgagtccactgacaaagaaaagaaagatacgtcatctgacaataatgagaagaaaggtcaatattccaagttctggaatgagtttggtaaatccattaaacttggtatcatcgaggatgccaccaacagaaatcgtttggcaaaactgctcagatttgagagcaccaagtctgagggtaaattgacatctctggatcagtacatatctagaatgaaagctgggcagaaggatatcttttacataactggaaccagcaaagaacaactggaaaactctccattccttgagcggcttaagaagaaaaattttgaggttattttcttcacggatccagttgatgaatacttgatgcaatacctgatggattatgaagacaagaagttccaaaatgtgtccaaggagggtttgaaactcgggaaagattcaaaagacaaggaactgaaggaatccttcaaggaccttaccaagtggtggaaaactgctctttccaaagacaatgttgatgatgtgaagatttccaaccgattggacaacactccttgtgtagtggtaacatcaaaatttggttggagtgctaacatggagagaatcatgcagtctcaaactttgtctgatgctagcaagcaagcatacatgcgcggcaagagggttcttgaggtcaatcctaggcaccctattatcaaggagctccgagagagagtagtaaagaaccctgaggatgagggtgtgaaacatacagcacagttgatgtaccagaccgcactcttcgaaagtggcttcctgcttgatgatcccaaggattttgcttcccgtatttatgattcagttaagaccagcttggacatcagtcctgaagcaacagttgaggaggaagatgacaccgaagtagaggctgaaagtgattcaaagcctgaagctgatgcggttcatgatggtgatgttgatgatgccaaggacgagttgtag

SEQ ID NO: 89 - protein, 813 aa, Glycine max
MRKWTVASALLLLSLLFLFADQGRKFQANAEGDSDELVDPPKVEDKIGAVPHGLSTDSDVVKRESESISKRSLRSNAEKFEFQAEVSRLMDIIINSLYSNKDIFLRELISNASDALDKIRFLSLTDKDVLGEGDNTKLDIQIKLDKEKKILSIRDRGIGMTKEDLIKNLGTIAKSGTSAFVEKMQTSGDLNLIGQFGVGFYSVYLVADYVEVISKNNDDKQYVWESKADGAFAISEDTWNEPLGRGTEIRLHLKEEAGEYLQESKLKELVKRYSEFINFPIYIWASKEVDVEVPADEDDSSDEEDSSESSSKEESEDEDADKSEDEEKKPKTKTVKETTYEWELLNDVKAIWLRNPKEVTEEEYTKFYHSLAKDFSDEKPLAWSHFTAEGDVEFKAVLFVPPKAPQDLYESYYNANKSNLKLYVRRVFISDEFNELLPKYLNFLLGLVDSDTLPLNVSREMLQQHSSLKTIKKKLIRKALDMIRRIADEDPDESTDKEKKDTSSDNNEKKGQYSKFWNEFGKSIKLGIIEDATNRNRLAKLLRFESTKSEGKLTSLDQYISRMKAGQKDIFYITGTSKEQLENSPFLERLKKKNFEVIFFTDPVDEYLMQYLMDYEDKKFQNVSKEGLKLGKDSKDKELKESFKDLTKWWKTALSKDNVDDVKISNRLDNTPCVVVTSKFGWSANMERIMQSQTLSDASKQAYMRGKRVLEVNPRHPIIKELRERVVKNPEDEGVKHTAQLMYQTALFESGFLLDDPKDFASRIYDSVKTSLDISPEATVEEEDDTEVEAESDSKPEADAVHDGDVDDAKDEL

SEQ ID NO: 90 - protein, 14 aa, Glycine max
APQDLYESYYNANK

SEQ ID NO: 91 - protein, 8 aa, Glycine max
AVLFVPPK

SEQ ID NO: 92 - protein, 11 aa, Glycine max
DFASRIYDSVK

SEQ ID NO: 93 - protein, 17 aa, Glycine max
DIFLRELISNASDALDK

SEQ ID NO: 94 - protein, 10 aa, Glycine max
DIFYITGTSK

SEQ ID NO: 95 - protein, 7 aa, Glycine max
DNVDDVK

SEQ ID NO: 96 - protein, 10 aa, Glycine max
DVLGEGDNTK

SEQ ID NO: 97 - protein, 11 aa, Glycine max
EEAGEYLQESK

SEQ ID NO: 98 - protein, 13 aa, Glycine max
EQLENSPFLERLK

SEQ ID NO: 99 - protein, 9 aa, Glycine max
EVTEEEYTK

SEQ ID NO: 100 - protein, 7 aa, Glycine max
FYHSLAK

SEQ ID NO: 101 - protein, 16 aa, Glycine max
IGAVPHGLSTDSDVVK

SEQ ID NO: 102 - protein, 15 aa, Glycine max
LGIIEDATNRNRLAK

SEQ ID NO: 103 - protein, 8 aa, Glycine max
NPEDEGVK

SEQ ID NO: 104 - protein, 9 aa, Glycine max
SGTSAFVEK

SEQ ID NO: 105 - DNA, 2103 bp, Glycine max
  CDS (1)..(2103)
atggcttcggagactgagacgttcgcttttcaggccgagatcaaccagctcctcagtctaataatcaacaccttctacagcaacaaggagatctttcttcgtgagctcatcagcaatgcctctgacgctttggacaagattcgatttgagagtcttacagacaagagcaagcttgatgctcagccagagttgttcattcacattattcctgacaagaccaacaacacattgtctatcattgacagtggtattggcatgactaaggctgatttggtgaataacctcggtactattgcaaggtctgggaccaaggaattcatggaagccctggctgctggtgctgacgtgagcatgattgggcagttcggtgttggtttctactcggcttatcttgtagctgataaggttattgttaccacaaagcacaatgatgatgaacagtatgtctgggagtcccatgccggtggctcatttactgtgacaagagatacatctggtgagaaccttggtaggggaacaaagataactttgtttcttaaggaagatcaacttgagtatcttgaggaacgccgtctgaaggatttgataaagaagcattctgaattcattagctatccaatttctctctggattgagaagactactgaaaaggagatttctgatgatgaggatgaggaagagaagaaggatgaggagggtaaagttgaagatgtggatgaagataaggagaaggaggagaagaaaaagaagaccattaaggaggtatctcacgagtggtcattggtgaacaagcagaagcctatttggatgaggaaacctgaagagattacgaaagaagaatatgctgctttctacaagagtcttaccaatgattgggaagagcatttggctgttaagcacttttctgttgagggtcagctggagtttaaggctgtcctctttatccccaagagggcaccttttgatctctttgacaccaggaagaagcctaacaacatcaaactgtatgtccgccgtgtcttcatcatggacaactgtgaggagttgatgcctgaatatcttagctttgttaagggtattgtggattctgaggatcttcctctcaacatttctagagaaatgctgcagcagaacaagatcctgaaagtcatcaggaagaacttggtcaagaagtgcattgagatgttctttgaaattgctgaaaacaaggaagactataacaagttttatgaagccttctctaagaacctgaaacttggtattcatgaggattctcagaacaagacaaagctagctgaattgctcaggtatcactccactaagagtggtgatgagatgaccagcctcaaggactatgttaccaggatgaaggaaggacagaatgacatctactacattactggtgaaagcaagaaagctgtcgagaattcccccttccttgaaaagcttaagaagaagggatacgaggttctctacatggttgatgctattgatgagtatgctgttggccagcttaaggaatttgagggaaagaagttggtctctgctaccaaggaaggcctaaaacttgatgagagcgaagacgagaagaaaaagaaggaagaactaaaggataaatttgagggtctttgccatgtgatcaaggatgtgttgggtgacaaggtggagaaagttgtggtgtctgatcgtgttgtggattctccttgctgtctggtgacaggtgaatatgggtggacagccaacatggaaaggattatgaaagcacaggcattgagggacagcagcatggctggatacatgtcaagcaagaagacgatggagattaaccctgagaaccccatcatggaggagctgaggaagcgagcagatgctgataagaatgacaagtctgtgaaggatctcgtgctcttgctctttgagactgctcttctaacttctgggttcagccttgatgatcccaacactttcggtaacaggattcacaggatgctgaagcttggactgagcattgatgaagatgctggtgaagcagatgctgacatgcctcctcttgaggacgctgatgcagatgctgagggtagcaagatggaagaagttgattaa

SEQ ID NO: 106 - protein, 700 aa, Glycine max
MASETETFAFQAEINQLLSLIINTFYSNKEIFLRELISNASDALDKIRFESLTDKSKLDAQPELFIHIIPDKTNNTLSIIDSGIGMTKADLVNNLGTIARSGTKEFMEALAAGADVSMIGQFGVGFYSAYLVADKVIVTTKHNDDEQYVWESHAGGSFTVTRDTSGENLGRGTKITLFLKEDQLEYLEERRLKDLIKKHSEFISYPISLWIEKTTEKEISDDEDEEEKKDEEGKVEDVDEDKEKEEKKKKTIKEVSHEWSLVNKQKPIWMRKPEEITKEEYAAFYKSLTNDWEEHLAVKHFSVEGQLEFKAVLFIPKRAPFDLFDTRKKPNNIKLYVRRVFIMDNCEELMPEYLSFVKGIVDSEDLPLNISREMLQQNKILKVIRKNLVKKCIEMFFEIAENKEDYNKFYEAFSKNLKLGIHEDSQNKTKLAELLRYHSTKSGDEMTSLKDYVTRMKEGQNDIYYITGESKKAVENSPFLEKLKKKGYEVLYMVDAIDEYAVGQLKEFEGKKLVSATKEGLKLDESEDEKKKKEELKDKFEGLCHVIKDVLGDKVEKVVVSDRVVDSPCCLVTGEYGWTANMERIMKAQALRDSSMAGYMSSKKTMEINPENPIMEELRKRADADKNDKSVKDLVLLLFETALLTSGFSLDDPNTFGNRIHRMLKLGLSIDEDAGEADADMPPLEDADADAEGSKMEEVD

SEQ ID NO: 107 - protein, 16 aa, Glycine max
ADLVNNLGTIARSGTK

SEQ ID NO: 108 - protein, 10 aa, Glycine max
AVENSPFLEK

SEQ ID NO: 109 - protein, 13 aa, Glycine max
EDQLEYLEERRLK

SEQ ID NO: 110 - protein, 8 aa, Glycine max
EEYAAFYK

SEQ ID NO: 111 - protein, 14 aa, Glycine max
EGQNDIYYITGESK

SEQ ID NO: 112 - protein, 17 aa, Glycine max
EIFLRELISNASDALDK

SEQ ID NO: 113 - protein, 7 aa, Glycine max
FYEAFSK

SEQ ID NO: 114 - protein, 11 aa, Glycine max
HFSVEGQLEFK

SEQ ID NO: 115 - protein, 9 aa, Glycine max
IRFESLTDK

SEQ ID NO: 116 - protein, 11 aa, Glycine max
LAELLRYHSTK

SEQ ID NO: 117 - protein, 8 aa, Glycine max
LDESEDEK

SEQ ID NO: 118 - protein, 10 aa, Glycine max
LGIHEDSQNK

SEQ ID NO: 119 - protein, 11 aa, Glycine max
RAPFDLFDTRK

SEQ ID NO: 120 - protein, 8 aa, Glycine max
VEDVDEDK

SEQ ID NO: 121 - DNA, 2109 bp, Glycine max
  CDS (1)..(2109)
atggcggagacagagacgttcgcattccaagcagagatcaaccagctcctcagtctcatcatcaacaccttctactccaacaaggagattttccttcgtgaactcatcagcaacgcctccgatgctttggacaagattcgatttgagagtttgacagataagagcaagctcgatgctcagccagagttgttcattcatattattccagacaagactaacaatacactgaccattgttgacagtggtattggcatgaccaaagctgatttggtgaacaacttgggtacaattgctagatctggtaccaaggaattcatggaagccttggctgctggtgctgatgttagtatgattggacagtttggtgtggggttctactctgcatatcttgttgctgagaaggtcattgttacaaccaaacacaatgatgatgaacagtatgtttgggagtctcaagctggaggttctttcactgtcaccagggataacactggtgaggttcttggcaggggtactaagatcactctctacctcaaggaagatcagcttgagtaccttgaggagcgtcgcttgaaggatctgatcaagaagcattctgagttcattagctacccaatttctctttggattgagaagactactgagaaggagatctctgacgatgaggatgaggaagagaagaaggatgaggagggtaaggtggaggatgttgacgaagagaaggagaaggaagaaaaaaagaaaaagaagatcaaggaagtgtcacatgaatggtccttggtgaacaagcagaagcccatttggatgaggaagcctgaggagatcacaaaagaggagtattctgctttctacaagagtcttaccaatgactgggaagagcatttggctgtcaagcacttctctgttgagggtcagttggagtttaaggctatactctttgttcccaagagggcaccttttgacctctttgacacaaggaagaagcctaacaacattaagctctatgtccgccgtgtctttattatggacaactgtgaggagttgattcctgagtatttgggctttgtcaagggtattgttgattctgaagatctcccactcaacatttcaagagaaatgttgcaacagaacaagatcttgaaggtcatccgtaagaacttggtcaagaagtgccttgagctcttctttgaaattgcagagaacaaggaggattacaacaagttctatgaggctttctctaagaacttaaagcttggtatccatgaggattcccagaacaagggaaagattgctgaattgctcaggtaccactccaccaagagtggtgatgagctgacaagcctcaaggattatgtgaccaggatgaaggaaggtcagagtgacatctactacatcaccggtgaaagcaagaaggctgttgagaactccccattcttggagaagttgaagaagaaagggtatgaggttcttttcatggttgatgccattgatgaatatgctgttggccagctcaaggaatttgagggcaagaagcttgtctctgccaccaaggagggtctcaaacttgacgagagtgaagatgagaagaagaagcaagaggagttgaaggagaagtttgacaacctatgcaaggtgatcaaggatgttttgggtgacaaggttgagaaggttgtagtctctgaccgtgttgttgattcaccatgctgtctggtgactggagaatacggttggactgcaaacatggaaaggatcatgaaagctcaagccctaagggacaacagcatggcaggatacatgtcaagcaagaagacaatggagatcaaccctgagaacccaatcatggaggagctcaggaagcgtgcggatgctgacaagaacgacaaatccgtgaaggaccttgttctgttgctgttcgagactgctcttctcacttctggtttcagccttgacgaacccaacacttttggaaacaggatccacagaatgttgaagcttggactgagcatcgacgaggatgcagctgaagctgatgctgatgctgatatgcccccactggaggaggaggctgaagctgatgctgagggcagcaaaatggaggaggttgattaa

SEQ ID NO: 122 - protein, 702 aa, Glycine max
MAETETFAFQAEINQLLSLIINTFYSNKEIFLRELISNASDALDKIRFESLTDKSKLDAQPELFIHIIPDKTNNTLTIVDSGIGMTKADLVNNLGTIARSGTKEFMEALAAGADVSMIGQFGVGFYSAYLVAEKVIVTTKHNDDEQYVWESQAGGSFTVTRDNTGEVLGRGTKITLYLKEDQLEYLEERRLKDLIKKHSEFISYPISLWIEKTTEKEISDDEDEEEKKDEEGKVEDVDEEKEKEEKKKKKIKEVSHEWSLVNKQKPIWMRKPEEITKEEYSAFYKSLTNDWEEHLAVKHFSVEGQLEFKAILFVPKRAPFDLFDTRKKPNNIKLYVRRVFIMDNCEELIPEYLGFVKGIVDSEDLPLNISREMLQQNKILKVIRKNLVKKCLELFFEIAENKEDYNKFYEAFSKNLKLGIHEDSQNKGKIAELLRYHSTKSGDELTSLKDYVTRMKEGQSDIYYITGESKKAVENSPFLEKLKKKGYEVLFMVDAIDEYAVGQLKEFEGKKLVSATKEGLKLDESEDEKKKQEELKEKFDNLCKVIKDVLGDKVEKVVVSDRVVDSPCCLVTGEYGWTANMERIMKAQALRDNSMAGYMSSKKTMEINPENPIMEELRKRADADKNDKSVKDLVLLLFETALLTSGFSLDEPNTFGNRIHRMLKLGLSIDEDAAEADADADMPPLEEEAEADAEGSKMEEVD

SEQ ID NO: 123 - protein, 16 aa, Glycine max
ADLVNNLGTIARSGTK

SEQ ID NO: 124 - protein, 10 aa, Glycine max
AVENSPFLEK

SEQ ID NO: 125 - protein, 13 aa, Glycine max
EDQLEYLEERRLK

SEQ ID NO: 126 - protein, 8 aa, Glycine max
EEYSAFYK

SEQ ID NO: 127 - protein, 14 aa, Glycine max
EGQSDIYYITGESK

SEQ ID NO: 128 - protein, 17 aa, Glycine max
EIFLRELISNASDALDK

SEQ ID NO: 129 - protein, 7 aa, Glycine max
FYEAFSK

SEQ ID NO: 130 - protein, 11 aa, Glycine max
HFSVEGQLEFK

SEQ ID NO: 131 - protein, 11 aa, Glycine max
IAELLRYHSTK

SEQ ID NO: 132 - protein, 9 aa, Glycine max
IRFESLTDK

SEQ ID NO: 133 - protein, 8 aa, Glycine max
LDESEDEK

SEQ ID NO: 134 - protein, 10 aa, Glycine max
LGIHEDSQNK

SEQ ID NO: 135 - protein, 11 aa, Glycine max
RAPFDLFDTRK

SEQ ID NO: 136 - protein, 9 aa, Glycine max
SGDELTSLK

SEQ ID NO: 137 - protein, 8 aa, Glycine max
VEDVDEEK

SEQ ID NO: 138 - DNA, 2109 bp, Glycine max
  CDS (1)..(2109)
atggcttcggagactgagacgtttgcttttcaggccgagatcaaccagctcctcagtctaatcatcaacaccttctacagcaacaaggagatctttcttcgtgagctcatcagcaatgcctctgatgctttggacaagattcgatttgagagtcttacagacaagagcaagcttgatgctcagccagagttgttcattcacattattcctgacaagaccaacaacacattgtctatcattgacagtggtattggcatgactaaggccgatttggtgaataacctcggtactattgcaaggtctgggaccaaggaattcatggaagccctggctgctggtgctgatgtgagcatgattggacagtttggtgttggtttctactcggcttatcttgtagctgacaaggttattgttaccacaaagcacaatgatgatgagcagtatgtctgggagtcccatgctggtggctcatttactgtgacaagggatacatctggtgagaaccttggtaggggaacaaagataactttgtttctcaaggaagatcaacttgagtatcttgaggaacgccgtctgaaggatttgataaagaagcattctgaattcattagctatccaatttctctttggattgagaagaccactgaaaaggagatttctgatgatgaggacgaggaagagaagaaggatgaggagggtaaagttgaagatgtggatgaagataaggagaaggaggagaagaaaaagaagaccattaaggaggtatctcatgagtggtcattggtgaacaagcagaagcctatttggatgaggaaacctgaagagatcacaaaagaagaatatgctgctttctacaagagtcttaccaatgattgggaagagcatttggctgttaagcacttttctgttgagggtcagctggagtttaaggctgtcctctttatccccaagagggcaccttttgatctttttgacactaagaagaagcctaacaacatcaaactgtatgtccgccgtgttttcatcatggacaactgtgaggagttgatgccagaatatcttagctttgttaagggtattgtggattctgaggatcttcctctcaacatttctagagaaatgctgcagcagaacaagatcctgaaagtcatcaggaagaacttggtcaagaagtgcattgagatgttctttgaaattgctgagaacaaggaagactataacaagttttatgaagccttctctaagaatctgaaacttggtattcatgaggattctcagaacaagacaaaacttgctgaattgctcaggtatcactccaccaagagtggtgatgagatgaccagcctcaaggactatgttaccaggatgaaggaagggcagaatgacatctactacattactggtgaaagcaagaaagctgttgagaattcccctttccttgaaaagcttaagaagaaggggttcgaggttctctacatggttgatgctattgacgagtatgctgttggtcagcttaaggaatttgagggaaagaagttggtctctgctactaaggaaggcctgaaacttgacgagagcgaagacgaaaagaaaaagaaggaagaattgaaggagaaatttgagggtctctgccatgtgatcaaggatgtgttgggtgacaaggtggagaaagttgtggtgtctgatcgtgttgtggattctccttgctgtctcgtgactggtgaatatgggtggacagccaacatggaaaggattatgaaagcacaggcattgagggacagcagcatggctggatacatgtcgagcaagaagaccatggagattaaccctgagaaccccatcatggatgaactgaggaagcgagctgatgctgacaagaatgacaaatctgtgaaggatctcgttctcctactctttgagactgctcttctaacttctgggttcagccttgatgatcccaacactttcggtaacaggattcacaggatgctgaagcttggactgagcattgatgaagatgctggtgaagcagatgctgacatgcctcctctcgaggacgccgatgctgatgccgatgctgagggtagcaagatggaagaagttgattaa

SEQ ID NO: 139 - protein, 702 aa, Glycine max
MASETETFAFQAEINQLLSLIINTFYSNKEIFLRELISNASDALDKIRFESLTDKSKLDAQPELFIHIIPDKTNNTLSIIDSGIGMTKADLVNNLGTIARSGTKEFMEALAAGADVSMIGQFGVGFYSAYLVADKVIVTTKHNDDEQYVWESHAGGSFTVTRDTSGENLGRGTKITLFLKEDQLEYLEERRLKDLIKKHSEFISYPISLWIEKTTEKEISDDEDEEEKKDEEGKVEDVDEDKEKEEKKKKTIKEVSHEWSLVNKQKPIWMRKPEEITKEEYAAFYKSLTNDWEEHLAVKHFSVEGQLEFKAVLFIPKRAPFDLFDTKKKPNNIKLYVRRVFIMDNCEELMPEYLSFVKGIVDSEDLPLNISREMLQQNKILKVIRKNLVKKCIEMFFEIAENKEDYNKFYEAFSKNLKLGIHEDSQNKTKLAELLRYHSTKSGDEMTSLKDYVTRMKEGQNDIYYITGESKKAVENSPFLEKLKKKGFEVLYMVDAIDEYAVGQLKEFEGKKLVSATKEGLKLDESEDEKKKKEELKEKFEGLCHVIKDVLGDKVEKVVVSDRVVDSPCCLVTGEYGWTANMERIMKAQALRDSSMAGYMSSKKTMEINPENPIMDELRKRADADKNDKSVKDLVLLLFETALLTSGFSLDDPNTFGNRIHRMLKLGLSIDEDAGEADADMPPLEDADADADAEGSKMEEVD

SEQ ID NO: 140 - protein, 16 aa, Glycine max
ADLVNNLGTIARSGTK

SEQ ID NO: 141 - protein, 10 aa, Glycine max
AVENSPFLEK

SEQ ID NO: 142 - protein, 13 aa, Glycine max
EDQLEYLEERRLK

SEQ ID NO: 143 - protein, 8 aa, Glycine max
EEYAAFYK

SEQ ID NO: 144 - protein, 14 aa, Glycine max
EGQNDIYYITGESK

SEQ ID NO: 145 - protein, 17 aa, Glycine max
EIFLRELISNASDALDK

SEQ ID NO: 146 - protein, 7 aa, Glycine max
FYEAFSK

SEQ ID NO: 147 - protein, 11 aa, Glycine max
HFSVEGQLEFK

SEQ ID NO: 148 - protein, 9 aa, Glycine max
IRFESLTDK

SEQ ID NO: 149 - protein, 11 aa, Glycine max
LAELLRYHSTK

SEQ ID NO: 150 - protein, 8 aa, Glycine max
LDESEDEK

SEQ ID NO: 151 - protein, 10 aa, Glycine max
LGIHEDSQNK

SEQ ID NO: 152 - protein, 10 aa, Glycine max
RAPFDLFDTK

SEQ ID NO: 153 - protein, 8 aa, Glycine max
VEDVDEDK

SEQ ID NO: 154 - DNA, 2109 bp, Glycine max; identical to SEQ ID NO: 138
  CDS (1)..(2109)

SEQ ID NO: 155 - protein, 702 aa, Glycine max; identical to SEQ ID NO: 139

SEQ ID NO: 156 - protein, 12 aa, Glycine max
AGGALSIAFVSK

SEQ ID NO: 157 - protein, 9 aa, Glycine max
DGLIVSIGK

SEQ ID NO: 158 - DNA, 2946 bp, Glycine max
  CDS (1)..(2946)
atggcttcttcttccacgacaatgcggttctccgcggcctccaccggcgccgcggcggcgcttcctcgccggagctccgtcgccggattcatcggcgtcgcggccagatcctccgccaaatcgaggctccgcttcatcggaaggaacgcgaacttgagcctccggatgaggaggatgagctctttctccgtcgtgaagtgcgtctccggaagcgaggccaaggtgcaggataccgtggccaaacaacaagaagctacaacctctctcagctccttcacgccagatgcttcatctattgcctcaagtattaaataccatgcagagttcactccattgttttctccagagaattttgatctaccacaggcttttcttgcaactgcacaaagtgttcgagattctctcattataaactggaatgctacctatgattactatgagaaactgaatgttaagcaggcatattacctttcgatggaatttttgcagggtagagcattattaaatgcaataggcaatctggagctaactggtccctatgctgaggctttgagcaagctcgggcataaattagaaaatgtggcataccaggagccagatgctgcacttggaaatggtggtcttgggcgtcttgcttcatgtttcttggactctttggcaaccttgaactatccagcttggggttatggattgagatataagtatggtttatttaaacagcgaataaccaaagatgggcaggaggaagttgctgaagattggcttgagatgggcaatccctgggagattattagaaatgatgtttcatatcctgtaaagttctatggcaaggttgtttcagggtcagatggtaaaaaacattggattggaggagaagatataaaagctgttgcacatgatgttcccataccaggatataaaactaagactacaatcaacttgagactttggtctacaaaagctgcatcagaagaatttgatttatctgcttttaatgctggaaggcacactgaagcatctgaggctctagcaaatgctgaaaagatatgctatatactctaccctggggatgaaccaatagagggcaagatccttcgcctcaagcaacaatatactttatgttctgcttctcttcaagacatcattgctcgttttgagagaagatcaggagcaaatgttaattgggaagagtttcccgagaaggttgcagtgcagatgaatgatactcacccaacgttgtgcatcccagagctcatgagaattttaatagatgtaaagggcttaaattggaaggatgcttggaatattacacaaaggactgtagcatatacaaaccacactgttcttccagaggcattagagaaatggagcttggatcttatgcagaaactgcttccacgccatattgagataatagaaatgattgacgaggagctggttcggaccataattgcagaatatggcacagaaaattcagacttgctggagaaaaaattgaaggaaatgagaatactagaaaatgtcgaattgactgcagaatttgcagatatactggttaagtccaaagaggccattgatattcctagtgaggagctgcaaagttctgaacaagcagaagcagaagacgaaaaagatgatgatgaagtggaagcagttgctaaaaagaatggaacagatgaaagttccattgaggatgagaaagaagagttgcctgagccagtaccagaaccaccaaaattggttcgtatggcaaatttgtgtgttgtgggtggtcatgcagtgaatggggttgcagagatacatagtgaaattgtaaaagatgatgttttcaatgcattttataagttgtggcccgagaagttccaaaacaaaacaaatggtgtgacaccaaggagatggatcaggttctgcaatccagatctgagtaaaataataaccgagtggataggtactgaggattgggtcctaaatactggaaaattggccgagctacggaagtttgtagacaatgaggatctacaagtgcagtggagggaagcaaagaggagtaacaaagttaaagttgcagcattcatcagagaaaaaacagggtattctgtcagtcctgatgcaatgtttgacatccaggtgaagagaatccatgaatataagcgacaattaatgaacatatttggaattgtttaccgatacaagaagatgaaagaaatgagtgcggcagaaagggaagcaaattttgttcctagagtttgtatatttgggggaaaagcatttgctacatatgtgcaagccaagagaattgtgaaatttattacagatgttggggctacagtaaatcatgaccctgaaataggagatctacttaaggttgtttttgtccctgattataatgtcagtgttgccgagatgcttattccagcaagtgaattgtcacaacatatcagtactgctggaatggaggcaagtggaactagcaatatgaaatttgcaatgaatggctgcatattgattggaactttagatggggccaatgttgaaataagggaagaggttggtgcagacaacttcttcctctttggtgccaaggctcatgaaattgctgggctgaggaaagaaagagcagagggaaagtttgtgcctgatccacgatttgaagaagttaaagaatttgtcagaagtggcatttttggatcttacaactatgacgaattgatgggatccttagaaggaaatgaaggttttggtcgagcagattatttccttgtagggaaagactttcccagctacatagaatgccaagagaaggttgatgaagcataccgtgaccaaactaaatggacaagaatgtcaatattgaacacagcaggttcatacaagtttagcagtgaccgcacgattcatgaatatgcccgagagatatggaacattgaaccagtccaattgccatag

SEQ ID NO: 159 - protein, 981 aa, Glycine max
MASSSTTMRFSAASTGAAAALPRRSSVAGFIGVAARSSAKSRLRFIGRNANLSLRMRRMSSFSVVKCVSGSEAKVQDTVAKQQEATTSLSSFTPDASSIASSIKYHAEFTPLFSPENFDLPQAFLATAQSVRDSLIINWNATYDYYEKLNVKQAYYLSMEFLQGRALLNAIGNLELTGPYAEALSKLGHKLENVAYQEPDAALGNGGLGRLASCFLDSLATLNYPAWGYGLRYKYGLFKQRITKDGQEEVAEDWLEMGNPWEIIRNDVSYPVKFYGKVVSGSDGKKHWIGGEDIKAVAHDVPIPGYKTKTTINLRLWSTKAASEEFDLSAFNAGRHTEASEALANAEKICYILYPGDEPIEGKILRLKQQYTLCSASLQDIIARFERRSGANVNWEEFPEKVAVQMNDTHPTLCIPELMRILIDVKGLNWKDAWNITQRTVAYTNHTVLPEALEKWSLDLMQKLLPRHIEIIEMIDEELVRTIIAEYGTENSDLLEKKLKEMRILENVELTAEFADILVKSKEAIDIPSEELQSSEQAEAEDEKDDDEVEAVAKKNGTDESSIEDEKEELPEPVPEPPKLVRMANLCVVGGHAVNGVAEIHSEIVKDDVFNAFYKLWPEKFQNKTNGVTPRRWIRFCNPDLSKIITEWIGTEDWVLNTGKLAELRKFVDNEDLQVQWREAKRSNKVKVAAFIREKTGYSVSPDAMFDIQVKRIHEYKRQLMNIFGIVYRYKKMKEMSAAEREANFVPRVCIFGGKAFATYVQAKRIVKFITDVGATVNHDPEIGDLLKVVFVPDYNVSVAEMLIPASELSQHISTAGMEASGTSNMKFAMNGCILIGTLDGANVEIREEVGADNFFLFGAKAHEIAGLRKERAEGKFVPDPRFEEVKEFVRSGIFGSYNYDELMGSLEGNEGFGRADYFLVGKDFPSYIECQEKVDEAYRDQTKWTRMSILNTAGSYKFSSDRTIHEYAREIWNIEPVQLP

SEQ ID NO: 160 - protein, 9 aa, Glycine max
AFATYVQAK

SEQ ID NO: 161 - protein, 23 aa, Glycine max
QQEATTSLSSFTPDASSIASSIK

SEQ ID NO: 162 - DNA, 2706 bp, Glycine max
  CDS (1)..(2706)
atggcgactgagaatcctttcaatagcattttgacgacgctcgaaaagcccggtggtgctggcgagtttggaaagtactttagcttgcctgctctcaacgatcgtagaatcgatagacttccttactctgtgaggatacttttggaatctgcaatccggaactgtgatgagtttcaagttaagagtaacgacgttgaaaaaattattgattgggagaatacctctccgaagctggtggagattccattcaagccagctagagtgcttctccaggattttactggcgtgcctgctgttgtcgatcttgcttgcatgcgagatgccatgaacaaacttggtggtgattctaataaaattaatcccttggtaccagttgatcttgtcattgatcactctgttcaagttgatgtggcaagatcagaaaatgctgtccaggcaaatatggaacttgaattccaaagaaacaaggaaagatttggtttcctcaaatggggttctaatgcattcaataatatgcttgtcgttcctcctggatcagggatagttcaccaggttaatttagaataccttggtagagttgtgttcaacacaaatggtgtgctttatcctgacagcgttgttggaactgattcacacacaactatgattgatggcctgggtgttgctggatggggagttggtggaatagaagcagaagctgcaatgcttggccaacccatgagcatggtcctaccgggtgtcgttgggttcaaattattaggcaaactacgagatggtgtcacagctactgacttggtgttgactgttacacaaatgctaagaaagcatggggttgttggcaagtttgtagagttttatggggaaggcatgagtgaactgtctttggcagatcgtgccaccatagcaaacatgtctcctgagtatggtgcaaccatgggcttctttcctgtggatcatgtcactttgcaatatttgagactgactggcagaagtgatgagactgtttctatgatagaatcgtacttacgagcaaataagatgtttgtggattacagcgagccccaagtggagagagtgtactcatcgtatttggaactcaatcttgaggatgtagaaccctgtgtctcaggtccaaaaaggcctcatgaccgtgtccctttgagagaaatgaaggtagactggcatgcctgcctcaacaataaagttggattcaagggttttgctgtaccaaaagaatctcagaataaggttgcagagttcacattccaagggacaccagcacatcttaggcacggtgatgttgttatagctgctatcaccagttgtacaaatacttcaaatcctagcgtaatgcttggagctgcattggttgcaaagaaagcatgtgaattgggattgcaggtgaagccatggattaaaacaagccttgccccaggttctggtgttgtgactaagtatttgcagaggagtggcttgcagaagtatttgaatgagctagggtttaatatagttgggtatggatgcaccacatgcattggaaattcaggggatattaatgaagctgttgcatctgcaattactgaaaatgatatagtagctgcagctgtactgtctggaaataggaactttgagggccgagttcacccattaacaagagctaattatcttgcttctcctcctcttgttgttgcctatgcccttgctggcacagtggacattgactttgacactgaacccattgggatagggaaggatggcacaaagatcttcttcagggatatttggccatccagtgaagaaatagcaaatgttgtacaatcaagtgtgctgcctgctatgtttagggacacatataatgcgatcacccaagggaatcccatgtggaataatttatctgttccaactggcactctttatgcttgggaccctacatcaacttatattcatgagccaccttattttagagatatgagcatgtctcccccaggctctcatggagtgaaagatgcttactgtttgctcaactttggagacagtatcacaactgaccacatctctccagctggcagcatacataaggacagtcctgcagccagataccttatagaacgtggggttgatagacgggacttcaactcctatggaagtcgccgtggtaatgatgaggtgatggcccgaggaacttttgccaatattcgcattgtcaacaaatttttgaatggagaagttggacctaaaactattcatattccttctggggagaagttatcagtctttgatgctgcagagaaatacaagagtgaggggcatgatatgattatcttggctggtgctgagtatgggagtggaagctctcgtgattgggctgcaaaggggccaatgctactgggcgtgaaagctgtcatagcaaaaagttttgaaaggattcaccgaagtaatttggtgggaatgggtatcattccattgtgttttaagcccggggatgatgctgattctcttggattaactggccatgaacgttacaccattgatctaccaagcaatgtgaatgaaatacgacccggccaagatgtcacagtggtgacagatgccgggaaatcatttgtatctacactgagatttgatacagaggttgaactagcttacttcaaccatggaggcatcttacaatatgtcatcagaaacatggtcaatgctaaacattga

SEQ ID NO: 163 - protein, 901 aa, Glycine max
MATENPFNSILTTLEKPGGAGEFGKYFSLPALNDRRIDRLPYSVRILLESAIRNCDEFQVKSNDVEKIIDWENTSPKLVEIPFKPARVLLQDFTGVPAVVDLACMRDAMNKLGGDSNKINPLVPVDLVIDHSVQVDVARSENAVQANMELEFQRNKERFGFLKWGSNAFNNMLVVPPGSGIVHQVNLEYLGRVVFNTNGVLYPDSVVGTDSHTTMIDGLGVAGWGVGGIEAEAAMLGQPMSMVLPGVVGFKLLGKLRDGVTATDLVLTVTQMLRKHGVVGKFVEFYGEGMSELSLADRATIANMSPEYGATMGFFPVDHVTLQYLRLTGRSDETVSMIESYLRANKMFVDYSEPQVERVYSSYLELNLEDVEPCVSGPKRPHDRVPLREMKVDWHACLNNKVGFKGFAVPKESQNKVAEFTFQGTPAHLRHGDVVIAAITSCTNTSNPSVMLGAALVAKKACELGLQVKPWIKTSLAPGSGVVTKYLQRSGLQKYLNELGFNIVGYGCTTCIGNSGDINEAVASAITENDIVAAAVLSGNRNFEGRVHPLTRANYLASPPLVVAYALAGTVDIDFDTEPIGIGKDGTKIFFRDIWPSSEEIANVVQSSVLPAMFRDTYNAITQGNPMWNNLSVPTGTLYAWDPTSTYIHEPPYFRDMSMSPPGSHGVKDAYCLLNFGDSITTDHISPAGSIHKDSPAARYLIERGVDRRDFNSYGSRRGNDEVMARGTFANIRIVNKFLNGEVGPKTIHIPSGEKLSVFDAAEKYKSEGHDMIILAGAEYGSGSSRDWAAKGPMLLGVKAVIAKSFERIHRSNLVGMGIIPLCFKPGDDADSLGLTGHERYTIDLPSNVNEIRPGQDVTVVTDAGKSFVSTLRFDTEVELAYFNHGGILQYVIRNMVNAKH

SEQ ID NO: 164 - protein, 9 aa, Glycine max
FLNGEVGPK

SEQ ID NO: 165 - protein, 9 aa, Glycine max
LSVFDAAEK

SEQ ID NO: 166 - protein, 9 aa, Glycine max
LSVFDVAEK

SEQ ID NO: 167 - protein, 12 aa, Glycine max
TSLAPGSGVVTK

SEQ ID NO: 168 - DNA, 2706 bp, Glycine max
  CDS (1)..(2706)
atggcgactgagaaccctttcaatagcattttgaggacgctcgagaagcccggcggcgctggcgagtttggaaagtactttagcttgcccgctctcaacgatcctagaatcgatagacttccttactctgtgaggatacttttggaatctgcaatccgtaactgtgatgagtttcaagttaagagtaacgacattgaaaaaattattgattgggagaatacctctcccaagctggtggagattccattcaagccagctagagtgcttctgcaggactttactggggtgcctgctgtggttgatcttgcttgcatgcgagatgcaatgaacaaacttggtggtgattctaataaaattaaccccttggtaccagttgatcttgtcattgatcactctgttcaagttgatgtggcaagatcagaaaatgctgtccaggcaaatatggaacttgaattccaaagaaacaaggaaagatttggtttcctcaaatggggttctaatgcattcaataatatgcttgtcgttcctcctggatcagggatagttcatcaggttaatttagaataccttggtagagttgtgttcaacacaaatggtgtgctttatccagacagcgttgtcggaactgattcacacactactatgatagatggcctgggtgttgctggatggggagttggtggaatagaagcagaagctgcaatgcttggccagcccatgagcatggtcctaccgggtgttgttgggttcaaattattaggcaaactacgagatggtgtcacagctactgacttggtgttgactgttactcaaatgctaagaaagcatggggttgttggcaagtttgtagagttttatggggaaggcatgagtgaactgtctttggcagatcgtgccactatagcaaacatgtctcctgagtatggtgcaaccatgggcttctttcctgtggatcatgtcactttgcaatatttgagactgactggcagaagtgatgagactgtttctatgatagaatcctatttacgagcaaataagatgtttgtggattatagcgagccccaagtggagagagtgtactcatcctatttggaactcaatcttgaggatgtagagccctgtgtctcaggtccaaaaaggcctcacgaccgtgtccctttgagagaaatgaaggtagactggcatgcctgcctcaacaataaagttggatttaagggttttgctgtatcaaaagaatctcagaataaggttgcagagttcacattccaagggacaccagcacatcttaggcatggtgatgttgttatagctgctatcaccagttgtacaaatacttcaaatcctagcgtaatgcttggagctgcattggttgcaaagaaagcatgtgaattgggattgcaggtgaagccatggattaaaacaagtcttgccccaggttctggtgttgtaactaagtatttgcagaggagtggcttgcagaagtatttgaatgagctagggtttaatatagttgggtatggatgcaccacatgcattggaaattcaggggatattaatgaagctgttgcatctgcgattaccgaaaatgatatagtagctgcagctgtattgtctggaaataggaactttgagggccgagttcacccattaacaagagctaattatcttgcttctcctcctcttgttgttgcctatgcccttgctggcacagtggacattgactttgacactgaacccattgggatagggaaggatggaacagagatcttcttcaaggatatttggccatccagtgaagaaatagcaaatgttgtacaatcaagtgtgctgcctgatatgtttagggacacatataatgcaatcacccaagggaatcccatgtggaataatttatctgttccaacgggcactctttatgcttgggaccctacatcgacttatattcatgagccaccttattttagagatatgagcatgtctcccccaggctctcatggagtgaaggatgcttactgtttgctcaactttggagacagtatcacaactgaccacatctctccagctggcagcatacataaggacagtcctgcggccagataccttatagaacgtggggttgatagacgggacttcaactcctatggaagtcgccgtggtaatgatgaggtgatggcccgaggaacgtttgccaatattcgcattgtcaacaaatttttgaatggagaagttggacctaaaactattcatattccttctggggagaagttgtcagtctttgacgttgcagagaaatacaagagtgaagggcatgatatgattatcttggctggtgctgagtatgggagtggaagctctcgtgattgggctgcaaaggggccaatgctactgggcgtgaaagctgtcatagcaaaaagttttgaaaggattcaccgaagtaatttggtgggaatgggtatcattcctttgtgttttaagcccggggaggatgctgattctcttggattaactggtcaagaacgttacaccattgatctaccaagcaatgtgaatgaaatacgacccggtcaagatgtcacagtggtgacagacaccgggaaatcatttgtatctacattgagatttgatactgaggttgaactagcttacttcaaccatggaggtatcttacaatatgtcatcagaaacttgatcaatgctaaacattga

SEQ ID NO: 169 - protein, 901 aa, Glycine max
MATENPFNSILRTLEKPGGAGEFGKYFSLPALNDPRIDRLPYSVRILLESAIRNCDEFQVKSNDIEKIIDWENTSPKLVEIPFKPARVLLQDFTGVPAVVDLACMRDAMNKLGGDSNKINPLVPVDLVIDHSVQVDVARSENAVQANMELEFQRNKERFGFLKWGSNAFNNMLVVPPGSGIVHQVNLEYLGRVVFNTNGVLYPDSVVGTDSHTTMIDGLGVAGWGVGGIEAEAAMLGQPMSMVLPGVVGFKLLGKLRDGVTATDLVLTVTQMLRKHGVVGKFVEFYGEGMSELSLADRATIANMSPEYGATMGFFPVDHVTLQYLRLTGRSDETVSMIESYLRANKMFVDYSEPQVERVYSSYLELNLEDVEPCVSGPKRPHDRVPLREMKVDWHACLNNKVGFKGFAVSKESQNKVAEFTFQGTPAHLRHGDVVIAAITSCTNTSNPSVMLGAALVAKKACELGLQVKPWIKTSLAPGSGVVTKYLQRSGLQKYLNELGFNIVGYGCTTCIGNSGDINEAVASAITENDIVAAAVLSGNRNFEGRVHPLTRANYLASPPLVVAYALAGTVDIDFDTEPIGIGKDGTEIFFKDIWPSSEEIANVVQSSVLPDMFRDTYNAITQGNPMWNNLSVPTGTLYAWDPTSTYIHEPPYFRDMSMSPPGSHGVKDAYCLLNFGDSITTDHISPAGSIHKDSPAARYLIERGVDRRDFNSYGSRRGNDEVMARGTFANIRIVNKFLNGEVGPKTIHIPSGEKLSVFDVAEKYKSEGHDMIILAGAEYGSGSSRDWAAKGPMLLGVKAVIAKSFERIHRSNLVGMGIIPLCFKPGEDADSLGLTGQERYTIDLPSNVNEIRPGQDVTVVTDTGKSFVSTLRFDTEVELAYFNHGGILQYVIRNLINAKH

SEQ ID NO: 170 - protein, 9 aa, Glycine max
FLNGEVGPK

SEQ ID NO: 171 - protein, 9 aa, Glycine max
LSVFDVAEK

SEQ ID NO: 172 - protein, 12 aa, Glycine max
TSLAPGSGVVTK

SEQ ID NO: 173 - DNA, 2292 bp, Glycine max
  CDS (1)..(2292)
atggcatctcacatcgttggatacccccgtatgggtcccaagagagagctcaagttcgctctcgagtctttctgggatggcaagagcagcgccgaggatttgcagaaggtgtcttctgatctcagggcatccatctggaagcagatggctgatgctgggatcaagtacatccccagcaacactttctctcactatgaccaggttctcgacgccaccgccaccctcggtgccgttccaccaaggtacggctggaccggcggcgagattgggtttgatacctacttctccatggccagaggtaatgctaccgtgccagctatggagatgaccaagtggttcgacaccaactaccactttattgtccctgaattgggccctgatgtgaacttcacctatgcttctcacaaggctgttgatgaatacaaggaggccaaggcgcttggagtggataccgttccggtcctcgttggccctgttacatacctgttgctctccaagcctgccaagggagttgagaaatccttttctctcctctctctccttcccaaggttcttgctgtctacaaggaagttattgctgaccttaaggcagctggtgcttcatggattcagtttgatgagcctacccttgtcttggaccttgagtctcacaagttgcaagcattcactgacgcatatgcagaacttgcgcctgctttgtctggtttgaatgttcttgttgagacctactttgctgacatccctgctgaggcatacaagaccctcacatctctgaatggcgtcactgcatatggatttgatttggtccgtggaaccaacactcttgatttgatcaagggtggatttcccagcggaaaatacctctttgctggagtggttgatggaaggaacatctgggccaatgaccttgctgcttctctcactaccttgcagggtcttgagggcattgtgggcaaagataagcttgttgtgtccacctcctcctcccttcttcacactgctgttgatctagttaacgagaccaagttggatgatgagatcaagtcatggctagcttttgctgcccaaaaaattgttgaagttaacgcattggctaaagcattgtctggccacaaggatgaggccttcttctctggtaatgctgctgctctggcttcaaggaagtcttctccaagagtgaccaacgaggctgttcagaaggctgctgctgcattgaagggttcagatcatcgccgtgcaacaaatgtcagtgccagactggattctcaacaaaagaagctcaaccttccaatcctgccaaccaccactattggatccttccctcagactgtagaactgaggagggtacgccgtgaattcaaggctaacaagatctccgaggaagagtatgtaaagtcaattaaggaggaaattcgcaaagttgttgagcttcaagaagagcttgatattgatgttcttgttcatggagaaccagagagaaatgatatggttgagtacttcggtgaacaattgtcaggctttgccttcaccgttaatgggtgggtgcaatcctatggttcccgttgcgtgaagccaccgatcatctatggtgatgtgagccgcccaaagccaatgaccgtcttctggtcatctctggctcagagctttaccaagcgcccaatgaagggaatgcttaccggtcctgttaccattctcaactggtcctttgttagaaatgaccaacctagatctgagaccacctaccagattgctttgtctatcaaggacgaagtggaagaccttgaaaaggctggcatcactgttatccaaattgatgaagctgctttgagagagggtcttccactgaggaaatcagagcaagctcactacttggactgggctgtccatgccttcagaatcaccaatgttggtgtccaggataccacccagatccacactcacatgtgctactcgaatttcaacgacatcatccactccatcatcgacatggacgccgatgttatcaccattgagaactctcgctccgacgagaagcttctgtcagtcttccgcgaaggtgtgaagtatggtgctggaattggccctggtgtctatgacatccactccccaagaataccaccaactgaagaaattgctgacagaatcaacaagatgctggcagtgctcgagaagaacatcttgtgggtgaaccctgactgtgggctcaagacccgtaagtacactgaggtgaagccagccctcacaaacatggttgccgcagcaaaactcatccgcaacgaacttgccaagtga

SEQ ID NO: 174 - protein, 763 aa, Glycine max
MASHIVGYPRMGPKRELKFALESFWDGKSSAEDLQKVSSDLRASIWKQMADAGIKYIPSNTFSHYDQVLDATATLGAVPPRYGWTGGEIGFDTYFSMARGNATVPAMEMTKWFDTNYHFIVPELGPDVNFTYASHKAVDEYKEAKALGVDTVPVLVGPVTYLLLSKPAKGVEKSFSLLSLLPKVLAVYKEVIADLKAAGASWIQFDEPTLVLDLESHKLQAFTDAYAELAPALSGLNVLVETYFADIPAEAYKTLTSLNGVTAYGFDLVRGTNTLDLIKGGFPSGKYLFAGVVDGRNIWANDLAASLTTLQGLEGIVGKDKLVVSTSSSLLHTAVDLVNETKLDDEIKSWLAFAAQKIVEVNALAKALSGHKDEAFFSGNAAALASRKSSPRVTNEAVQKAAAALKGSDHRRATNVSARLDSQQKKLNLPILPTTTIGSFPQTVELRRVRREFKANKISEEEYVKSIKEEIRKVVELQEELDIDVLVHGEPERNDMVEYFGEQLSGFAFTVNGWVQSYGSRCVKPPIIYGDVSRPKPMTVFWSSLAQSFTKRPMKGMLTGPVTILNWSFVRNDQPRSETTYQIALSIKDEVEDLEKAGITVIQIDEAALREGLPLRKSEQAHYLDWAVHAFRITNVGVQDTTQIHTHMCYSNFNDIIHSIIDMDADVITIENSRSDEKLLSVFREGVKYGAGIGPGVYDIHSPRIPPTEEIADRINKMLAVLEKNILWVNPDCGLKTRKYTEVKPALTNMVAAAKLIRNELAK

SEQ ID NO: 175 - protein, 21 aa, Glycine max
AGITVIQIDEAALREGLPLRK

SEQ ID NO: 176 - protein, 24 aa, Glycine max
ALGVDTVPVLVGPVTYLLLSKPAK

SEQ ID NO: 177 - protein, 16 aa, Glycine max
DEAFFSGNAAALASRK

SEQ ID NO: 178 - protein, 8 aa, Glycine max
DEVEDLEK

SEQ ID NO: 179 - protein, 8 aa, Glycine max
ISEEEYVK

SEQ ID NO: 180 - protein, 9 aa, Glycine max
IVEVNALAK

SEQ ID NO: 181 - protein, 8 aa, Glycine max
LIRNELAK

SEQ ID NO: 182 - protein, 10 aa, Glycine max
LLSVFREGVK

SEQ ID NO: 183 - protein, 21 aa, Glycine max
LVVSTSSSLLHTAVDLVNETK

SEQ ID NO: 184 - protein, 10 aa, Glycine max
SFSLLSLLPK

SEQ ID NO: 185 - protein, 12 aa, Glycine max
SSPRVTNEAVQK

SEQ ID NO: 186 - protein, 26 aa, Glycine max
TLTSLNGVTAYGFDLVRGTNTLDLIK

SEQ ID NO: 187 - protein, 29 aa, Glycine max
YGAGIGPGVYDIHSPRIPPTEEIADRINK

SEQ ID NO: 188 - DNA, 2196 bp, Glycine max
  CDS (1)..(2196)
atggcttcttccacttcctctatctctctctcccaagccctcctccgccccaccaccacctctctcccctcctcctcctcctccctccgcctcacccccactctccgccctaccccacccgccctctccctccgccgccgcctcaccacctccatccgcgccgccgcctccgtcaaaaccgtcgagaaggcaaccgcggacgccgcgctggtcgaaaaatccgtcaacacgatccgcttcctcgccatcgacgccgtcgagaaggcgaattcgggtcacccggggctccccatgggatgcgctccgatgggtcacgtgctatatgatgaaaccatgaagtataaccctaagaaccctttctggttcaaccgcgatcgcttcgttctctccgctgggcacgggtgcatgcttcagtacgcgcttctgcacctcgctgggttcgatagcgtcaaggaagaggatttgagggaatttcgccaatgggggagcagaactccgggacaccctgagaattttgagactccgggaattgaagttacaacaggtcctcttggtcaggggattgccaatgctgttggtttggcccttgcagagaagcacttggctgcaagatacaacaagcctgacaatgagattgttgaccattacacgtatgctattctgggtgatggttgtcaaatggagggaattgcaaatgaagcatgctcacttgctggccactggggactggggaagctgatagcattttatgatgacaatcatatttctattgatggtaacacagagattgcgttcaccgagagtgttgatagtcgttttgagggacttgggtggcatgttatttgggtaaagaatggaaataatggctatgatgatattcgtgctgccattaaggaagcaaaagctgtcaaagacaaacccacattaatcaaggtcacaacaaccattggttatggttctcctaacaaggctaactcctacagtgtgcatggaagtgcactgggtgccaaagaagttgatgccaccaggcagaaccttggatggtcacatgagccattccacgtgcctgaggatgtcaaaaagcattggagtcgccacacccctgagggtgctgcacttgaagctgagtggaatgctaagtttgctgagtatgaaaagaaatacaaggaggaggctgcagaattgaaatctattatcaatggtgaattccctgctggttgggagaaagcacttccgacatacactccagagagcccagcggatgccaccagaaacctgtctcaaacaaaccttaatgcccttgcaaaggttcttcccggtctgcttggtggcagtgcagatcttgcttcttccaacatgaccttgctcaaaatgttcggggacttccaaaaggatactccagcagagcgtaatgttagattcggtgttagagaacacggaatgggagctatctgcaacggcattgctcttcacagccctggactgattccatattgtgcaaccttctttgtattcactgactacatgagaggtgccataaggctttctgcgctgtctgaggctggggttatttatgtcatgacccatgattcaataggacttggagaagatgggccaacccaccagccaattgagcacctagcaagcttccgggcaatgccaaacattttgatgcttcgtcccgccgacggtaacgaaacagccggagcatacaaagtggccgtgctcaacaggaagagaccctccattcttgccctatccaggcaaaaactgccccagcttcccggaacttccattgaaggagttgaaaagggtggttacaccatttcggacaactccactggcaacaagcctgatgtcattttgatcggaactggttcggaattggaaatcgctgccaaagctgctgatgacctaaggaaggaagggaaggctgttagagttgtttcccttgtttcttgggaactttttgatgagcaatcagaagcctacaaggagagtgttttccctgctgctgtttcagccagagttagcattgaggcaggatcaacatttgggtgggagaaaattgttggagcaaagggaaaagcaataggcattgatcgttttggagctagtgctccagctggaagaatatacaaagaatttggtatcactaaggaagctgttgttgctgcagctaaagagcttatctag

SEQ ID NO: 189 - protein, 731 aa, Glycine max
MASSTSSISLSQALLRPTTTSLPSSSSSLRLTPTLRPTPPALSLRRRLTTSIRAAASVKTVEKATADAALVEKSVNTIRFLAIDAVEKANSGHPGLPMGCAPMGHVLYDETMKYNPKNPFWFNRDRFVLSAGHGCMLQYALLHLAGFDSVKEEDLREFRQWGSRTPGHPENFETPGIEVTTGPLGQGIANAVGLALAEKHLAARYNKPDNEIVDHYTYAILGDGCQMEGIANEACSLAGHWGLGKLIAFYDDNHISIDGNTEIAFTESVDSRFEGLGWHVIWVKNGNNGYDDIRAAIKEAKAVKDKPTLIKVTTTIGYGSPNKANSYSVHGSALGAKEVDATRQNLGWSHEPFHVPEDVKKHWSRHTPEGAALEAEWNAKFAEYEKKYKEEAAELKSIINGEFPAGWEKALPTYTPESPADATRNLSQTNLNALAKVLPGLLGGSADLASSNMTLLKMFGDFQKDTPAERNVRFGVREHGMGAICNGIALHSPGLIPYCATFFVFTDYMRGAIRLSALSEAGVIYVMTHDSIGLGEDGPTHQPIEHLASFRAMPNILMLRPADGNETAGAYKVAVLNRKRPSILALSRQKLPQLPGTSIEGVEKGGYTISDNSTGNKPDVILIGTGSELEIAAKAADDLRKEGKAVRVVSLVSWELFDEQSEAYKESVFPAAVSARVSIEAGSTFGWEKIVGAKGKAIGIDRFGASAPAGRIYKEFGITKEAVVAAAKELI

SEQ ID NO: 190 - protein, 18 aa, Glycine max
AIGIDRFGASAPAGRIYK

SEQ ID NO: 191 - protein, 27 aa, Glycine max
ALPTYTPESPADATRNLSQTNLNALAK

SEQ ID NO: 192 - protein, 14 aa, Glycine max
ANSYSVHGSALGAK

SEQ ID NO: 193 - protein, 10 aa, Glycine max
ATADAALVEK

SEQ ID NO: 194 - protein, 7 aa, Glycine max
DKPTLIK

SEQ ID NO: 195 - protein, 30 aa, Glycine max
GGYTISDNSTGNKPDVILIGTGSELEIAAK

SEQ ID NO: 196 - protein, 14 aa, Glycine max
LPQLPGTSIEGVEK

SEQ ID NO: 197 - protein, 14 aa, Glycine max
NGNNGYDDIRAAIK

SEQ ID NO: 198 - protein, 15 aa, Glycine max
SVNTIRFLAIDAVEK

SEQ ID NO: 199 - protein, 12 aa, Glycine max
VTTTIGYGSPNK

SEQ ID NO: 200 - DNA, 1797 bp, Glycine max
  CDS (1)..(1797)
atggaagttccttcggaggtaccatctactgacactggcaccagcaccggcaccggcgaaaccatgagcaagaatgcgttgaagcgggagctgaagaacaaacagagagaagaagaaaggaagcgcaaggatgaggagaaggccaaaaaggcagctgaagcacaacaggcaaaggataacaaatctgcaccagctgatgatgaggatatggatccaactcaataccttgagaacaggctaaagtatcttgcagttcaaaagacagaagggaagaacccgtatcctcataaattctttgtcactatgtctattgatcaatacatcaaggaatatggaggtttaagcaacgggcaacacattgaggatgtctctgtgtctttggctggccggatcatgcacaaacgcacctctggttctaagcttgtcttttatgacctgcacggtggtggttgcaaggtccaggttatggctgatgctagtaaatcagacttggatgaggctggattttccaaattccattctaatgtgaagcgcggtgacatagttggtgtcactgggttcccaggcaaaagtaagaagggcgaacttagtatttttcccaagaattttgtgtcgctgtctcattgtttgcacatgatgccaaggcaaaagtctgctgctgctgctattgataatagaaatccatggataccgggaagtactaggaatcctgaaacatatattttgaaggatcaggaaactagatatcggttacgccatttggatttgatgcttaatccagaggttcgagacatattcaagaccaggtctaaaatcatttcttacattaggaggttccttgatgaccttgatttcttggaggttgaaacacctatgatgaatatgattgctggtggagctgcagcccgtccatttgtaacacatcacaatgatcttaacatgaggttattcatgaggattgctccagaactgtatcttaaggagttggttgttggtggactggatcgtgtttatgaaattggtaaacaatttaggaatgagggcatagatttgactcataatcctgagtttactacctgtgagttctatatggcttataaggactacaatgacttaatggatctaacagagcaaatgttgagtggtatggttaaggagcttacgaaaggcagctataaaatcaagtatcatgcagatgggattgataaggaacctattgaaattgactttactacaccttttagaaggattgacatgattgaagagttagagaagatggcaggtctaagtattcccaaagacttgtcaagtgaggaagccaatcaatatttgaaggatgcatgcgtgaagtatgagatcaaatgtcctccccctgagacaactgctcgtttgttggataaacttgtgggtcactttttggaagaaacgtgtgtaaatcctacattcatcaaaaaccatcctgagatcatgagtcctctagcaaagtggcacagatcaaaaccaggcctgactgaacgttttgaattgtttgttaataaacgtgaactttgcaatgcatatactgaattgaatgaccctgtagtacaacgacagagatttgctgaacaactcaaggatcggcaatctggcgatgatgaagcaatggccttagatgaaacattttgtacggctctagaatatggtttaccacctactggtggttggggtttgggcattgatcggttgaccatgttactgactgattcacagaatattaaggaggttcttctcttccctgccatgaaacctcaagactga

SEQ ID NO: 201 - protein, 598 aa, Glycine max
MEVPSEVPSTDTGTSTGTGETMSKNALKRELKNKQREEERKRKDEEKAKKAAEAQQAKDNKSAPADDEDMDPTQYLENRLKYLAVQKTEGKNPYPHKFFVTMSIDQYIKEYGGLSNGQHIEDVSVSLAGRIMHKRTSGSKLVFYDLHGGGCKVQVMADASKSDLDEAGFSKFHSNVKRGDIVGVTGFPGKSKKGELSIFPKNFVSLSHCLHMMPRQKSAAAAIDNRNPWIPGSTRNPETYILKDQETRYRLRHLDLMLNPEVRDIFKTRSKIISYIRRFLDDLDFLEVETPMMNMIAGGAAARPFVTHHNDLNMRLFMRIAPELYLKELVVGGLDRVYEIGKQFRNEGIDLTHNPEFTTCEFYMAYKDYNDLMDLTEQMLSGMVKELTKGSYKIKYHADGIDKEPIEIDFTTPFRRIDMIEELEKMAGLSIPKDLSSEEANQYLKDACVKYEIKCPPPETTARLLDKLVGHFLEETCVNPTFIKNHPEIMSPLAKWHRSKPGLTERFELFVNKRELCNAYTELNDPVVQRQRFAEQLKDRQSGDDEAMALDETFCTALEYGLPPTGGWGLGIDRLTMLLTDSQNIKEVLLFPAMKPQD

SEQ ID NO: 202 - protein, 12 aa, Glycine max
DLSSEEANQYLK

SEQ ID NO: 203 - DNA, 1728 bp, Glycine max
  CDS (1)..(1728)
atgtaccgctttgcaacctccctcgcctccaaagctagaattgccaggagcagcactcaacagattggaagtagggtcacttggaacaggaattatgcggccaaagacattaagtttggtgtggaggctcgggctctgatgcttaagggtgtcgaagagctcgctgatgccgttaaagtaacaatgggccctaaggggcgtaatgtggttattgagcaaagttttggagcacctaaagtgacgaaagatggagtaaccgttgctaagagcattgaattcaaggacaaagtcaagaatatcggtgccagtcttgtaaagcaggttgctaatgctactaatgacgtggctggtgatggaaccacttgtgctacaattcttactaaagcaatatttacggaaggatgtaaatcagttgcagctggaatgaatgcgatggacctgagacgaggtataaatatggctgttgatgctgtggtgacaaatctgaaaagcagagcacgtatgattagcacttctgaagaaattgcccaggttggaacaatatctgccaatggggagagggaaattggtgagttaattgcaaaagctatggagaaagttggcaaagagggtgtcatcacaatctcagatggcaagacattgtacaatgagttggaagtcgttgaaggaatgaagctcgacaggggatacatttctccatatttcataacaaaccagaagaaccagaaatgtgaacttgaggatcctctcattataatccatgaaaagaaaatctcaagcataaatgctatcgttaaagtattagagttagctttgaagagacaaagatctttattgattgtcgccgaggatgtggaaagtgatgcccttgcaactcttattctaaataaacttcgtgctggaatcaaggtatgtgccatcaaagctcctggttttggtgaaaaccgtaaatctggtctccaggatcttgctgttcttacaggaggtcaacttatcaccgaagagcttggtttgaatcttgaaaaagtagacctggacttatttggctcttgcaagaagataacaatttctaaagatgacactgtcatccttgatggagctggtgataagaaagcaattgaggaaagatgtgagcagattagatcagcaattgaaaatagcacttcagattatgacaaggaaaagttacaggaaagattagccaagctttctgggggtgttgcagtactgaagattggaggagccagtgaggctgaagttggtgagaagaaggatagagtgacagatgccttaaatgcaaccaaggcagctgtagaggagggcatagtacctggtggtggtgttgctcttctttatgcatcgagtgagttggataagcttcaaactgccaactttgatcaaaagataggtgtccagatcatccaaaatgctttgaagactcctgtgcacacaattgcttcaaatgcaggagttgagggtgctgttgttgttggcaaactattggaacagaatgatcctgatcttggatatgatgcagccaaaggtgaatatgttgatatggttaaaactggaattattgatccattgaaggttattaggaccgccttggttgatgcagccagtgtgtcatctttgatgacaacaactgaagctgttgtgtctgaactcccgaaggacgataaagatgttcctgccatgggtggtggcatgggtggcatggattattaa

SEQ ID NO: 204 - protein, 575 aa, Glycine max
MYRFATSLASKARIARSSTQQIGSRVTWNRNYAAKDIKFGVEARALMLKGVEELADAVKVTMGPKGRNVVIEQSFGAPKVTKDGVTVAKSIEFKDKVKNIGASLVKQVANATNDVAGDGTTCATILTKAIFTEGCKSVAAGMNAMDLRRGINMAVDAVVTNLKSRARMISTSEEIAQVGTISANGEREIGELIAKAMEKVGKEGVITISDGKTLYNELEVVEGMKLDRGYISPYFITNQKNQKCELEDPLIIIHEKKISSINAIVKVLELALKRQRSLLIVAEDVESDALATLILNKLRAGIKVCAIKAPGFGENRKSGLQDLAVLTGGQLITEELGLNLEKVDLDLFGSCKKITISKDDTVILDGAGDKKAIEERCEQIRSAIENSTSDYDKEKLQERLAKLSGGVAVLKIGGASEAEVGEKKDRVTDALNATKAAVEEGIVPGGGVALLYASSELDKLQTANFDQKIGVQIIQNALKTPVHTIASNAGVEGAVVVGKLLEQNDPDLGYDAAKGEYVDMVKTGIIDPLKVIRTALVDAASVSSLMTTTEAVVSELPKDDKDVPAMGGGMGGMDY

SEQ ID NO: 205 - protein, 24 aa, Glycine max
AAVEEGIVPGGGVALLYASSELDK

SEQ ID NO: 206 - protein, 11 aa, Glycine max
DRVTDALNATK

SEQ ID NO: 207 - protein, 10 aa, Glycine max
EGVITISDGK

SEQ ID NO: 208 - protein, 14 aa, Glycine max
GRNVVIEQSFGAPK

SEQ ID NO: 209 - protein, 10 aa, Glycine max
GVEELADAVK

SEQ ID NO: 210 - protein, 12 aa, Glycine max
IGGASEAEVGEK

SEQ ID NO: 211 - protein, 11 aa, Glycine max
IGVQIIQNALK

SEQ ID NO: 212 - protein, 9 aa, Glycine max
ISSINAIVK

SEQ ID NO: 213 - protein, 15 aa, Glycine max
LLEQNDPDLGYDAAK

SEQ ID NO: 214 - protein, 9 aa, Glycine max
LQTANFDQK

SEQ ID NO: 215 - protein, 9 aa, Glycine max
LSGGVAVLK

SEQ ID NO: 216 - protein, 8 aa, Glycine max
NIGASLVK

SEQ ID NO: 217 - protein, 8 aa, Glycine max
TGIIDPLK

SEQ ID NO: 218 - protein, 20 aa, Glycine max
TPVHTIASNAGVEGAVVVGK

SEQ ID NO: 219 - DNA, 1725 bp, Glycine max
  CDS (1)..(1725)
atgtatcgctttgcttctaacctcgcttccaaagcaaggattgctaggagtagcagccaccagattggaagtaggctgagttcgagcagaaactatgcggctaaagacattagatttggtgtggaggctcgggcactgatgcttaagggtgttgaagagctagctgatgctgtcaaagtaaccatgggtcccaaggggcgtaatgttgtgattgagcaaagttttggtgcccctaaagtaaccaaagatggagtaactgttgcaaagagcattgaattcaaggataaagttaagaatgttggtgccagtcttgtaaagcaggttgcaaatgctactaatgatgtggctggtgatggaaccacgtgcgctacagtccttacacgagcaatatttactgaaggctgcaaatcagttgcggctggaatgaatgcaatggacctgaggcgtggtataagtatggctgtcgatgctgtggtgacaaacttgaaaagcagagcaaggatgattagcacatctgaagaaatagcacaggtagggacaatatctgctaacggagagagagaaattggtgagttgattgcaaaagctatggagaaagttggcaaagagggagtaatcacaatttcagatggcaaaaccttatataatgagttggaagttgttgaaggaatgaagctcgacaggggctacatatctccttatttcattacaaatgataagaaccagaaatgtgaacttgaagatcccctcattctaattcatgagaagaaaatctcgagtataaatgctatagttaaagtcttagagttggctttgaagagacaaagatctttattgattattgccgaggatgtggaaagtgatgcacttgcaactcttattctaaataagcttcgggctggaattaaggtatgtgctattaaagcccctggttttggcgaaaataggaaagccaatcttcaagatcttgcagttctcacaggaggagcacttattactgaagagcttggcttgaagcttgaaaaagtggatttggatatgcttggcacctgtaaaaaaataacagtttctaaggatgacactgtcattcttgacggagcaggtgacaagaaagcacttgaggaaagatgcgagcagattaggtctgcaattgaaaacagcacctcagattatgacaaggaaaagttacaggaaagattagccaagctttctggtggtgttgccgtgcttaagattggaggagccagtgaagctgaagttggtgagaagaaggatagagtgacagatgccttaaatgcaactaaggctgctgtagaggaaggcattgtatcaggtggtggtgttgctcttctatatgcgtcaaaagagttggataaacttcaaactgctaactttgatcagaagattggtgtccagattatccaaaatgctttaaagacacctgtgctcacaattgcatcaaatgcgggtgttgagggtgcagttgttgttggcaaactattggaacaggagaatcatgatctaggatatgatgcagccaaaggtgaatatgttgatatggttaaagctggaatcatagaccctttgaaggtgattaggacagccttggttgatgcagccagtgtatcatctttgatgacaacaactgaagctgttgtgtctgaacttccaaacgatgataaagatactccagctatggctggtggcatgggtggcatgggttat

SEQ ID NO: 220 - protein, 575 aa, Glycine max
MYRFASNLASKARIARSSSHQIGSRLSSSRNYAAKDIRFGVEARALMLKGVEELADAVKVTMGPKGRNVVIEQSFGAPKVTKDGVTVAKSIEFKDKVKNVGASLVKQVANATNDVAGDGTTCATVLTRAIFTEGCKSVAAGMNAMDLRRGISMAVDAVVTNLKSRARMISTSEEIAQVGTISANGEREIGELIAKAMEKVGKEGVITISDGKTLYNELEVVEGMKLDRGYISPYFITNDKNQKCELEDPLILIHEKKISSINAIVKVLELALKRQRSLLIIAEDVESDALATLILNKLRAGIKVCAIKAPGFGENRKANLQDLAVLTGGALITEELGLKLEKVDLDMLGTCKKITVSKDDTVILDGAGDKKALEERCEQIRSAIENSTSDYDKEKLQERLAKLSGGVAVLKIGGASEAEVGEKKDRVTDALNATKAAVEEGIVSGGGVALLYASKELDKLQTANFDQKIGVQIIQNALKTPVLTIASNAGVEGAVVVGKLLEQENHDLGYDAAKGEYVDMVKAGIIDPLKVIRTALVDAASVSSLMTTTEAVVSELPNDDKDTPAMAGGMGGMGY

SEQ ID NO: 221 - protein, 8 aa, Glycine max
AGIIDPLK

SEQ ID NO: 222 - protein, 11 aa, Glycine max
DRVTDALNATK

SEQ ID NO: 223 - protein, 10 aa, Glycine max
EGVITISDGK

SEQ ID NO: 224 - protein, 14 aa, Glycine max
GRNVVIEQSFGAPK

SEQ ID NO: 225 - protein, 10 aa, Glycine max
GVEELADAVK

SEQ ID NO: 226 - protein, 12 aa, Glycine max
IGGASEAEVGEK

SEQ ID NO: 227 - protein, 11 aa, Glycine max
IGVQIIQNALK

SEQ ID NO: 228 - protein, 9 aa, Glycine max
ISSINAIVK

SEQ ID NO: 229 - protein, 15 aa, Glycine max
LLEQENHDLGYDAAK

SEQ ID NO: 230 - protein, 9 aa, Glycine max
LQTANFDQK

SEQ ID NO: 231 - protein, 9 aa, Glycine max
LSGGVAVLK

SEQ ID NO: 232 - DNA, 1869 bp, Glycine max
  CDS (1)..(1869)
atggctcaagttcttgagaaccccaccattgacgcggcggcttccggcgcgaacccctcgctgacgaccatctcgttgtacgtcggggatcttcaccacgacgtcaacgatccgcagctgtatgatctcttcaaccaggttgcccaagtcgtttccgttcgaatttgcagggacgtggccacccaacaatcccttggttacggctacgtcaatttcagcaacgctcacgatgccgcaaaagcaattgatgtgctgaatttcactccactgaacggcaaaatcattaggataatgtactctattcgggaccctagtgctcggaagagtggtgcagctaatgttttcataaagaatttggacaaggcgattgatcacaaggctttgtacgatacattttcggcttttgggaatattctatcttgcaaggttgcgacagatgcttctggccagtctaaaggccatggttttgtgcagtttgagagtgaagaatctgcacaaaatgcaattgacaagttaaacggcatgctgatcaatgataagcaggtctttgtgggtcctttcctgcggaagcaggatagagagagtgctctcagtggcacaaagtttaataacgttttcgtgaaaaacctgttggattcaatgactgaggctgacttggagagaatttttggagaatatggagctattactagcgctgtagtgatgagagatgtagatggtaaatcaaaaggttttggttttgtcaattttgcaaatgtagacgatgctgctaaagctgtggaggctcttaatggaaagaattttgatggtaaggagtggtatgttggaaaagcccagaaaaagtctgaaagggagcttgaactgaaagggcaacatgaacagattacaaaggagactgttgataaatatcatggtacaaacttgtatatcaagaacttggatgatagtgttggtgatgaagaactcatggaactgttctctgagtttggtacgataacctcatgcaaggttatgcgagatccaaatggaattagtagaggatctggatttgtttcattttcaattgctgagggagcaactcgggctcttggtgagatgaatggtaaaatggttgctggcaaacctctctatgttgcccttgcacagagaaaagaagatagaagagcaaggttacaggcacaattttcacaatcgaggcctgctgcaataacccctaatgtttcacctcgaatgcctctataccctctaggggctcctgcgataggacaacaatttttgtatgggcaagcagctccagccacgatacctcaacattttgttcctggaatgaggccaggtggtgctccaaacttctatgttccactggttcagcagggtcaacagggacagcgcccaggaggacaccgaggatcaggtcctatgcaacagctccagcagccattgccattgatgcaccaacagatgcttccaaggggacatgtctatcgatatccttctggctccaatatgcaaaatattcaactggcaggagtacctggaggaatggtcacttatggcattggtcaacaaatgcccacgcaggccctggcctcggcccttgccaatgctactcctgaacagcagaggactatgcttggtgaagctttatacccgttagtagataagctggagcatgaagcagcagcaaaggttactggtatgctcttagagatggatcagcctgaggtattacatctgattgagtcaccggatgctctcaaggctaaagttgttgaggccatggatgtgttgaagaaagttacacagcagcaatcaaacagcccagccgatcaactggcttcactctctctgaatgataatgtcgagtct

SEQ ID NO: 233 - protein, 623 aa, Glycine max
MAQVLENPTIDAAASGANPSLTTISLYVGDLHHDVNDPQLYDLFNQVAQVVSVRICRDVATQQSLGYGYVNFSNAHDAAKAIDVLNFTPLNGKIIRIMYSIRDPSARKSGAANVFIKNLDKAIDHKALYDTFSAFGNILSCKVATDASGQSKGHGFVQFESEESAQNAIDKLNGMLINDKQVFVGPFLRKQDRESALSGTKFNNVFVKNLLDSMTEADLERIFGEYGAITSAVVMRDVDGKSKGFGFVNFANVDDAAKAVEALNGKNFDGKEWYVGKAQKKSERELELKGQHEQITKETVDKYHGTNLYIKNLDDSVGDEELMELFSEFGTITSCKVMRDPNGISRGSGFVSFSIAEGATRALGEMNGKMVAGKPLYVALAQRKEDRRARLQAQFSQSRPAAITPNVSPRMPLYPLGAPAIGQQFLYGQAAPATIPQHFVPGMRPGGAPNFYVPLVQQGQQGQRPGGHRGSGPMQQLQQPLPLMHQQMLPRGHVYRYPSGSNMQNIQLAGVPGGMVTYGIGQQMPTQALASALANATPEQQRTMLGEALYPLVDKLEHEAAAKVTGMLLEMDQPEVLHLIESPDALKAKVVEAMDVLKKVTQQQSNSPADQLASLSLNDNVES

SEQ ID NO: 234 - protein, 13 aa, Glycine max
AIDVLNFTPLNGK

SEQ ID NO: 235 - protein, 7 aa, Glycine max
FNNVFVK

SEQ ID NO: 236 - protein, 15 aa, Glycine max
GFGFVNFANVDDAAK

SEQ ID NO: 237 - protein, 9 aa, Glycine max
SGAANVFIK

SEQ ID NO: 238 - DNA, 1851 bp, Glycine max
  CDS (1)..(1851)
atggattctgattatggtattcccagggaactctcagatcttcaaaagattcggtctttgtaccagccagagctccctccttgtctccagggaaccactgtgagggttgaatttggtgacgcaaccaccactgctgaccccactgatgcactcaccgtctgcagggcttttcctaacacttatggacaccctttggctcactttctcagggccactgccaaagtccctgatgctcagatcataactgagttccctcctattagggtggggattgtcttttgtgggagacaatctcctggagggcataatgtcatttggggtatccacaatgctctcaaaattcacaatcccaacagtgttttgcttggatttcttggtggttcagaaggtctatttgcccagaaaactctggagataactgacgatattctttcgacgtacaaaaatcaaggtggttatgatttgcttgggcggacgaaggatcaaattaggaccacagaacaagttaatgctgcacttgctgcatgcaacaatttgaaacttgatggccttgtcataatcggaggggtgacatcaaacacagatgctgcacagcttgctgaaacatttgttgtagcaaaatgccccacaaaggtggttggtgttcctgtcactctgaatggagatcttaaaaaccagtttgtagaaactaatgttggttttgatacaatttgtaaggttaattctcagctcatcagcaatgtctgcactgatgctctctctgcagagaagtattattatttcatccgtcttatgggacgcaaggcatcacacgttgctttggaatgcaccctccagtcccatccaaatatggtaattcttggtgaggaggttgctgcatcaaagcttaccctttctgaaattgcaaaacagattactgatgcaattcaggctagagcagagcaagacaaataccatggagtcattctccttccagaagggctgatagagagtattcctgaagtgtatgccctcttgaaggaaattcatggtttactcagacaaggtgttgaagttgacaagatatcttctcagctaacaccatgggcatctgctttatttgaatttctgccaccctttattaggagacagttgctcctttaccctgaatccgacgactcagcacagttatcacagattgaaactgagaaattactagcatatcttgtggaagtcgagattaacaagcgtctgaaagaaggcacatacaaggggaagaaattcaatgccatttgccacttttttggttatcaagctcgtggatctctgccatcaaaatttgactgtgattacgcatatgtccttgggcacatctgctaccatatactggccgctggtctaaatggatacatggcaactttaactaacctgaagaatccagtaaacaagtggaaatgtggggctgctccaattgcatctatgatgactgtaaagcgctggtctccaaatccaggagctacatcaattggaaaacctgctattcatccagctactgtggacttgagaggcaaagcatatgagctgttgagacaaaaggcacaaagctttcttatggatgacatctacagaaatccaggtccacttcagtttgatggtcccggcgcagatgccaaggttataactctttctgttgaagaccaggactacatgggccgcattaagaaacttcaggagtaccttgaacaggttcgaaccattgtcaagccaggatgccctcaggaggttttgaaagctgctctaagcgtcatggcgtcggttaccgaagttctagctgcaatgtcaacatcttataccaacaccctggcatccctg

SEQ ID NO: 239 - protein, 617 aa, Glycine max
MDSDYGIPRELSDLQKIRSLYQPELPPCLQGTTVRVEFGDATTTADPTDALTVCRAFPNTYGHPLAHFLRATAKVPDAQIITEFPPIRVGIVFCGRQSPGGHNVIWGIHNALKIHNPNSVLLGFLGGSEGLFAQKTLEITDDILSTYKNQGGYDLLGRTKDQIRTTEQVNAALAACNNLKLDGLVIIGGVTSNTDAAQLAETFVVAKCPTKVVGVPVTLNGDLKNQFVETNVGFDTICKVNSQLISNVCTDALSAEKYYYFIRLMGRKASHVALECTLQSHPNMVILGEEVAASKLTLSEIAKQITDAIQARAEQDKYHGVILLPEGLIESIPEVYALLKEIHGLLRQGVEVDKISSQLTPWASALFEFLPPFIRRQLLLYPESDDSAQLSQIETEKLLAYLVEVEINKRLKEGTYKGKKFNAICHFFGYQARGSLPSKFDCDYAYVLGHICYHILAAGLNGYMATLTNLKNPVNKWKCGAAPIASMMTVKRWSPNPGATSIGKPAIHPATVDLRGKAYELLRQKAQSFLMDDIYRNPGPLQFDGPGADAKVITLSVEDQDYMGRIKKLQEYLEQVRTIVKPGCPQEVLKAALSVMASVTEVLAAMSTSYTNTLASL

SEQ ID NO: 240 - protein, 13 aa, Glycine max
VVGVPVTLNGDLK

SEQ ID NO: 241 - DNA, 1575 bp, Glycine max
  CDS (1)..(1575)
atgcccaaattttttcatagcattttcagaggaacaatggcgggtagggtttcgacgtgcttcttcttcgtgtttgctctttctctccttcttccttttcagatctccgctgaggaatcatcggagaaagagttcgtactcacattggatcactctaactttcacgacactgtcagcaagcacgatttcatcgtcgtcgagttctacgctccatggtgtggccactgtaagaagcttgctcccgagtatgagaaagctgcttctatcttgagtagtcatgatcctccggttgttttggctaaaattgatgccaatgaggagaagaacaaagaccttgcatctcaatatgatgttaggggatacccaacaattaagattctgagaaatgggggaaagaatgttcaggaatacaaaggtccccgtgaagcagatggcatcgttgactatttgaagaaacaaagtggtcctgcttcaactgaaattaaatctgctgatgaagctactgctttcattggtgaaaataaagttgctattgttggagttttcccgaaattttctggagaggagtttgacaacttttctgccttagcagagaagttgcgttctgactatgacttcggtcacactctgaatgccaaacaccttccaagaggagagtcatcagtttctggtcccgtagttaggttgttcaagccattcgatgaactttttgttgacttccaggatttcaatgtggaagctctagagaaatttgttgaggaatctagtacccctgttgttactgtctttaacaatgatccgagcaatcaccctttcgttgccaaattcttcaacagtcccaatgcaaaggcaatgttgttcatcaacttcactgccgaaggtgctgaatctttcaaatcaaaataccgtgaagctgctgagcaacataaacaacagggtgtaagctttttggtgggagatgttgagtctagtcaaggtgctttccagtattttggactgaaagaagaacaagtacctctaattatcattcaacacaatgacgggaaaaagttttttaaacccaatttggaagctgatcacattccaacttggttgaaggcgtacaaggatggtaatgttgcaccatttgtgaagtctgaacccattcctgaagctaacgatgaacctgttaaagtggtagttgggaacagtcttgaggacattgttttcaaatctgggaagaatgttctgctggagttttatgctccctggtgtggtcattgcaaacagttggctccaatattggacgaagttgctatctcatatcaaagtgatgctgatgttgttattgcaaaactggatgcaactgccaacgatatcccaagtgaaacctttgatgtccaaggttatccaaccgtgtacttcaggtcagcaagtggaaagttatcacaatacgaagggggtaggaccaaggaagacatcatagaattcatcgaaaagaaccgggacaaacctgctcagcaagaacaaggacaagataaacctgctcagcaagaacaaggacaagatgagcaagaaaaaggaaaagatgagctt

SEQ ID NO: 242 - protein, 525 aa, Glycine max
MPKFFHSIFRGTMAGRVSTCFFFVFALSLLLPFQISAEESSEKEFVLTLDHSNFHDTVSKHDFIVVEFYAPWCGHCKKLAPEYEKAASILSSHDPPVVLAKIDANEEKNKDLASQYDVRGYPTIKILRNGGKNVQEYKGPREADGIVDYLKKQSGPASTEIKSADEATAFIGENKVAIVGVFPKFSGEEFDNFSALAEKLRSDYDFGHTLNAKHLPRGESSVSGPVVRLFKPFDELFVDFQDFNVEALEKFVEESSTPVVTVFNNDPSNHPFVAKFFNSPNAKAMLFINFTAEGAESFKSKYREAAEQHKQQGVSFLVGDVESSQGAFQYFGLKEEQVPLIIIQHNDGKKFFKPNLEADHIPTWLKAYKDGNVAPFVKSEPIPEANDEPVKVVVGNSLEDIVFKSGKNVLLEFYAPWCGHCKQLAPILDEVAISYQSDADVVIAKLDATANDIPSETFDVQGYPTVYFRSASGKLSQYEGGRTKEDIIEFIEKNRDKPAQQEQGQDKPAQQEQGQDEQEKGKDEL

SEQ ID NO: 243 - protein, 16 aa, Glycine max
AASILSSHDPPVVLAK

SEQ ID NO: 244 - protein, 9 aa, Glycine max
DGNVAPFVK

SEQ ID NO: 245 - protein, 15 aa, Glycine max
DLASQYDVRGYPTIK

SEQ ID NO: 246 - protein, 9 aa, Glycine max
EDIIEFIEK

SEQ ID NO: 247 - protein, 15 aa, Glycine max
EEQVPLIIIQHNDGK

SEQ ID NO: 248 - protein, 17 aa, Glycine max
EFVLTLDHSNFHDTVSK

SEQ ID NO: 249 - protein, 16 aa, Glycine max
FFKPNLEADHIPTWLK

SEQ ID NO: 250 - protein, 8 aa, Glycine max
FFNSPNAK

SEQ ID NO: 251 - protein, 15 aa, Glycine max
FSGEEFDNFSALAEK

SEQ ID NO: 252 - protein, 25 aa, Glycine max
FVEESSTPVVTVFNNDPSNHPFVAK

SEQ ID NO: 253 - DNA, 1509 bp, Glycine max
  CDS (1)..(1509)
atggcgggtacggtttcgacttgtttcttcttcgtgtttcttctttctctccttcttccttttcagatctccgctgaggaatcctcggagaaggagttcgtactcacattggatcactctaactttcacgacactgtcagcaagcacgatttcatcgtcgtcgagttctacgccccatggtgtggtcactgtaagaagcttgctccggagtatgagaaagctgcttctatcttgagtagtcatgatcctcctattgttttggctaaagtagatgccaatgaggagaagaacaaagaccttgcatcacaatatgatgttaagggattcccaacaattaatattctgagaaatgggggaaagaatgttcaggaatacaaaggtccccgtgaagcagatggcatcgttgactatttgaagaaacaaagtggtcctgcttcaactgaaattaaatctgctgatgaagctactgcttttattggtgaaaataaagttgctattgttggagttttcccgaaattttctggagaggagtttgacaacttttctgccttagcagagaagttgcgttctgattatgactttggtcacactctgaatgccaaactccttccaagaggagagtcatcagtttctgggcccgtagttaggctgttcaagccattcgatgaactttttgttgacttccaggatttcaatgtggaagctctagagaagtttgttgaggaatctagtacccctgttgttactgtctttaacaatgaaccgagcaatcaccctttcgttgtcaaattcttcaacagtcccaacgcaaaggcaatgttgttcatcaacttcactgccgaaggtgctgaagctatcaaatcaaaataccgtgaagctgctgagcaatataaacaacagggtgtcagctttttggtgggagatgttgagtctagtcaaggtgctttccagtattttggactgaaagaagagcaagtacctctaattatcattcaacataatgatgggaaaaagttttttaaacccaatttggaagctgatcacattccaacctggttgaaggcatacaaggatggtcatgttgcaccatttgttaagtctgaacccattcccgagactaacgatgaacctgttaaagtggtagttggggccagtcttgaggacattgttttcaaatctgggaagaatgttctgctggagttttatgctccctggtgtggtcattgcaaacagttggctccaatattggatgaagttgctatctcatatcaaaatgaagctgatgttgttattgcaaaactggatgcaactgccaacgatatcccaagtgaaacctttgatgtccaaggttatcctaccgtgtacttcaggtcagcaagtggaaagttatcacaatacgacggcggtaggaccaaggaagacatcatagaattcatcgaaaagaaccgggataaacctgctcagcaagaacaaggaaaagatgagcaagaacaaggaaaagatgagctt

SEQ ID NO: 254 - protein, 503 aa, Glycine max
MAGTVSTCFFFVFLLSLLLPFQISAEESSEKEFVLTLDHSNFHDTVSKHDFIVVEFYAPWCGHCKKLAPEYEKAASILSSHDPPIVLAKVDANEEKNKDLASQYDVKGFPTINILRNGGKNVQEYKGPREADGIVDYLKKQSGPASTEIKSADEATAFIGENKVAIVGVFPKFSGEEFDNFSALAEKLRSDYDFGHTLNAKLLPRGESSVSGPVVRLFKPFDELFVDFQDFNVEALEKFVEESSTPVVTVFNNEPSNHPFVVKFFNSPNAKAMLFINFTAEGAEAIKSKYREAAEQYKQQGVSFLVGDVESSQGAFQYFGLKEEQVPLIIIQHNDGKKFFKPNLEADHIPTWLKAYKDGHVAPFVKSEPIPETNDEPVKVVVGASLEDIVFKSGKNVLLEFYAPWCGHCKQLAPILDEVAISYQNEADVVIAKLDATANDIPSETFDVQGYPTVYFRSASGKLSQYDGGRTKEDIIEFIEKNRDKPAQQEQGKDEQEQGKDEL

SEQ ID NO: 255 - protein, 16 aa, Glycine max
AASILSSHDPPIVLAK

SEQ ID NO: 256 - protein, 9 aa, Glycine max
DGHVAPFVK

SEQ ID NO: 257 - protein, 9 aa, Glycine max
DLASQYDVK

SEQ ID NO: 258 - protein, 9 aa, Glycine max
EDIIEFIEK

SEQ ID NO: 259 - protein, 15 aa, Glycine max
EEQVPLIIIQHNDGK

SEQ ID NO: 260 - protein, 17 aa, Glycine max
EFVLTLDHSNFHDTVSK

SEQ ID NO: 261 - protein, 16 aa, Glycine max
FFKPNLEADHIPTWLK

SEQ ID NO: 262 - protein, 8 aa, Glycine max
FFNSPNAK

SEQ ID NO: 263 - protein, 15 aa, Glycine max
FSGEEFDNFSALAEK

SEQ ID NO: 264 - protein, 25 aa, Glycine max
FVEESSTPVVTVFNNEPSNHPFVVK

SEQ ID NO: 265 - protein, 13 aa, Glycine max
GFPTINILRNGGK

SEQ ID NO: 266 - protein, 13 aa, Glycine max
GPREADGIVDYLK

SEQ ID NO: 267 - protein, 7 aa, Glycine max
LAPEYEK

SEQ ID NO: 268 - protein, 29 aa, Glycine max
LDATANDIPSETFDVQGYPTVYFRSASGK

SEQ ID NO: 269 - protein, 14 aa, Glycine max
LRSDYDFGHTLNAK

SEQ ID NO: 270 - protein, 10 aa, Glycine max
LSQYDGGRTK

SEQ ID NO: 271 - protein, 23 aa, Glycine max
QLAPILDEVAISYQNEADVVIAK

SEQ ID NO: 272 - protein, 24 aa, Glycine max
QQGVSFLVGDVESSQGAFQYFGLK

SEQ ID NO: 273 - protein, 10 aa, Glycine max
QSGPASTEIK

SEQ ID NO: 274 - protein, 13 aa, Glycine max
SADEATAFIGENK

SEQ ID NO: 275 - protein, 13 aa, Glycine max
SEPIPETNDEPVK

SEQ ID NO: 276 - protein, 9 aa, Glycine max
VAIVGVFPK

SEQ ID NO: 277 - protein, 13 aa, Glycine max
VVVGASLEDIVFK

SEQ ID NO: 278 - protein, 9 aa, Glycine max
YREAAEQYK

SEQ ID NO: 279 - DNA, 1467 bp, Glycine max
  CDS (1)..(1467)
atgggtgtggctcaaaacattcccgatgcggaggagggaaccttggagattggaatggaatacagaactgtttctggagttgctgggccattggtcattcttgataaagttaagggacccaagtttcaagagattgttaacattcgcttaggagatggtactactcggcgtggacaagtgctagaagttgatggtgaaaaggctgttgttcaggtctttgagggtacatctgggattgacaataaatttacaactgtgcaatttactggagaggtgttaaaaactccagtatcattggacatgcttggccgcatattcaatggttctggaaaaccaattgataatggtccacccattttacctgaggcttacttggacatatcaggaagttccatcaaccctagtgagagaacctatccagaggagatgatacagacaggaatatctaccattgatgtcatgaattctattgctagaggtcaaaagatccctctattctcagctgctggtctcccccataatgaaattgctgcacagatatgccgtcaggctggcttagtcaagcgactagaaaagtctgataatcttctcgagggtggaggagaagaggacaattttgccattgtgtttgcagctatgggagttaacatggagactgcacagtttttcaaacgtgactttgaggaaaatggctcgatggagagagtgacccttttccttaatctggcaaatgatcctacgattgagcgtatcatcactcctcgtattgctcttactactgctgaatatttggcatatgaatgtggcaagcatgttcttgtgatactaactgatatgagttcttatgctgatgctcttcgtgaggtatctgctgcccgagaagaagtacctggtagacgtgggtatcccggctacatgtatacagatcttgcaacaatatacgaacgtgctggaagaattgaggggcgaaaaggctctattacacaaattccaattctaaccatgcctaatgatgatattacgcatccaactcctgatcttacaggatatattactgagggacagatatatatcgacagacagttgtataacaggcagatatatcctccaatcaatgtccttccatcattgtctcgtttgatgaagagtgccattggtgagggaatgacacgaaaggatcattctgatgtgtccaaccagctctatgcaaattatgccattggaaaggatgtccaggcaatgaaagccgtggtcggagaagaagcactttcatctgaggacctgctgtatttggaatttttggagaagtttgagaggaagtttgttgcccaaggagcatacgatacacgcaatatcttccagtcactagatcttgcatggactttgcttcggattttccctcgcgagcttctccaccgtattcctgcaaagactcttgatcagttctacagccgagatgccagtaac

SEQ ID NO: 280 - protein, 489 aa, Glycine max
MGVAQNIPDAEEGTLEIGMEYRTVSGVAGPLVILDKVKGPKFQEIVNIRLGDGTTRRGQVLEVDGEKAVVQVFEGTSGIDNKFTTVQFTGEVLKTPVSLDMLGRIFNGSGKPIDNGPPILPEAYLDISGSSINPSERTYPEEMIQTGISTIDVMNSIARGQKIPLFSAAGLPHNEIAAQICRQAGLVKRLEKSDNLLEGGGEEDNFAIVFAAMGVNMETAQFFKRDFEENGSMERVTLFLNLANDPTIERIITPRIALTTAEYLAYECGKHVLVILTDMSSYADALREVSAAREEVPGRRGYPGYMYTDLATIYERAGRIEGRKGSITQIPILTMPNDDITHPTPDLTGYITEGQIYIDRQLYNRQIYPPINVLPSLSRLMKSAIGEGMTRKDHSDVSNQLYANYAIGKDVQAMKAVVGEEALSSEDLLYLEFLEKFERKFVAQGAYDTRNIFQSLDLAWTLLRIFPRELLHRIPAKTLDQFYSRDASN

SEQ ID NO: 281 - protein, 17 aa, Glycine max
DHSDVSNQLYANYAIGK

SEQ ID NO: 282 - protein, 26 aa, Glycine max
FQEIVNIRLGDGTTRRGQVLEVDGEK

SEQ ID NO: 283 - protein, 12 aa, Glycine max
FTTVQFTGEVLK

SEQ ID NO: 284 - protein, 12 aa, Glycine max
TLDQFYSRDASN

SEQ ID NO: 285 - DNA, 1464 bp, Glycine max
  CDS (1)..(1464)
atgggtgtggctgagaacattcccgatatggaggagggtaccttggagattggaatggaatacagaactgtatctggagttgctggaccattggtcattcttgacaaagttaagggacccaaatttcaagagattgttaatattcgtttaggagatggaactactcggcgtggacaagttctagaggttgatggcgaaaaggctgttgttcaggtatttgaaggcacatctgggatcgacaataagtttacaactgtgcaatttactggagaggtgttaaaaactcctgtctcactggacatgcttggacgcatatttaatggttctggaaaaccaattgataatggtccaccaattttacctgaggcttacctggatatttctggaagttccatcaatcctagtgagagaacctatcctgaggagatgatacagacaggaatatctacaattgatgtcatgaattctattgctagaggtcaaaagatccctctattctcagcagctggtctcccccataatgaaattgctgcacagatctgtcgtcaggctggcttagtcaagcgactagagaaatctgataatcttcttgagggtggagaagaggacaattttgctattgtgtttgcagctatgggagttaacatggagactgcacagtttttcaagcgtgactttgaggagaatggatcaatggagagagtgactcttttccttaatttggcaaatgatcctacaattgagcgtattatcactcctcgtattgctcttactactgctgaatatttggcttatgaatgtggcaagcacgttcttgtgatactcacagacatgagttcttatgctgatgctcttcgtgaggtatctgctgcccgagaagaagtgccgggtagacgtggttatcctggatatatgtatacagatcttgcaacaatttatgaacgagctgggagaattgaggggcgtaaaggctctattacacaaattccaattctaaccatgcccaatgatgatattacgcacccaactcctgatctaacaggatatatcactgaggggcagatatacatcgacaggcagctgtataatagacagatatacccaccaatcaacgtcctcccatcactatctcggttgatgaagagtgctattggtgagggaatgactagaagggatcattctgatgtgtccaaccagctctatgcaaattatgctattggaaaggatgtccaggcaatgaaagcagtggttggagaagaagcactttcatctgaggacctgctgtatctggaatttttggagaagtttgagaggaagtttgttgcccagggagcctatgacacccgcaatatattccagtcacttgatcttgcatggactttactccggattttccctcgtgaacttcttcatcgtataccagccaagactcttgaccagttttacagcagagatgctggtaat

SEQ ID NO: 286 - protein, 488 aa, Glycine max
MGVAENIPDMEEGTLEIGMEYRTVSGVAGPLVILDKVKGPKFQEIVNIRLGDGTTRRGQVLEVDGEKAVVQVFEGTSGIDNKFTTVQFTGEVLKTPVSLDMLGRIFNGSGKPIDNGPPILPEAYLDISGSSINPSERTYPEEMIQTGISTIDVMNSIARGQKIPLFSAAGLPHNEIAAQICRQAGLVKRLEKSDNLLEGGEEDNFAIVFAAMGVNMETAQFFKRDFEENGSMERVTLFLNLANDPTIERIITPRIALTTAEYLAYECGKHVLVILTDMSSYADALREVSAAREEVPGRRGYPGYMYTDLATIYERAGRIEGRKGSITQIPILTMPNDDITHPTPDLTGYITEGQIYIDRQLYNRQIYPPINVLPSLSRLMKSAIGEGMTRRDHSDVSNQLYANYAIGKDVQAMKAVVGEEALSSEDLLYLEFLEKFERKFVAQGAYDTRNIFQSLDLAWTLLRIFPRELLHRIPAKTLDQFYSRDAGN

SEQ ID NO: 287 - protein, 26 aa, Glycine max
FQEIVNIRLGDGTTRRGQVLEVDGEK

SEQ ID NO: 288 - protein, 12 aa, Glycine max
FTTVQFTGEVLK

SEQ ID NO: 289 - protein, 12 aa, Glycine max
TLDQFYSRDAGN

SEQ ID NO: 290 - DNA, 1407 bp, Glycine max
  CDS (1)..(1407)
atggccaccgctgccgagaaactctccgctctcaaatccgccgtcgccggattgaacgaaatcagtgagaatgagaagaacggattcatcagcctcgtcggccgctatctcagtggcgaagcgcagcatgtggaatggagcaagatccagacgcctacggacgaagtggttgtgccttacgacactttggcgccaactcctgaaggttcttcggaggtgaagaatctattggacaagcttgtggtgttgaagctaaatggaggcttgggaacaactatgggttgcactggtcctaaatctgtaattgaagttcgtgatgggttgacatttctagatttaattgtcatccaaattgagaatctcaattccaaatatggaagcaatgttcctttgcttttgatgaattcattcaacactcatgatgacactcaaaagattgttgaaaaataccaaaactcaaatattgagattcatacttttaaccagagccagtatcctcgattggttgttgaggactttttgccattgccttccaaagggcatactgacaaggatggatggtaccctcctggccatggtgatgtcttcccatcattattgaacagtggcaaacttgatgcactattgtcacagggtaaagagtatgtgtttgttgccaattcggataacttgggagctatagttgacttgaaaatcttgaatcatttgatccagaacaagaatgaatactgtatggaggtgactcccaaaacattggctgatgtaaagggtggcactttgatttcttacgaaggaagggttcagctcctggaaattgcacaagtccccgatgaacatgtcaatgagttcaagtcaatagagaagttcaaaattttcaacacaaataatttgtgggtgaacttaaacgcagttaaaaggcttgttgaagctgatgctcttaagatggaaattattcccaatccaaaggaagttgacggaataaaagttcttcagctggaaactgcagctggtgctgcaataaggttctttgacaaggctattgggattaatgttcctcgatcacgattccttcctgtgaaggcaacttcagatttgcttcttgtccagtctgacctctacactttggaagacggatttgtcattcggaacaaagctagggaaaatcctgaaaacccttctattgaactgggaccagaatttaagaaggttagcaacttcttgggccgcttcaagtcaattcctagtatcgttgagcttgacagtctaaaagtggctggtgatgtatggtttggagctggtgttatcctcaaggggaaagtcagcattgtatcaaagcccggtgtaaagctggaagttcccgacggtgttgccattgtagacaaggaaattaatggcccagaggacctg

SEQ ID NO: 291 - protein, 469 aa, Glycine max
MATAAEKLSALKSAVAGLNEISENEKNGFISLVGRYLSGEAQHVEWSKIQTPTDEVVVPYDTLAPTPEGSSEVKNLLDKLVVLKLNGGLGTTMGCTGPKSVIEVRDGLTFLDLIVIQIENLNSKYGSNVPLLLMNSFNTHDDTQKIVEKYQNSNIEIHTFNQSQYPRLVVEDFLPLPSKGHTDKDGWYPPGHGDVFPSLLNSGKLDALLSQGKEYVFVANSDNLGAIVDLKILNHLIQNKNEYCMEVTPKTLADVKGGTLISYEGRVQLLEIAQVPDEHVNEFKSIEKFKIFNTNNLWVNLNAVKRLVEADALKMEIIPNPKEVDGIKVLQLETAAGAAIRFFDKAIGINVPRSRFLPVKATSDLLLVQSDLYTLEDGFVIRNKARENPENPSIELGPEFKKVSNFLGRFKSIPSIVELDSLKVAGDVWFGAGVILKGKVSIVSKPGVKLEVPDGVAIVDKEINGPEDL

SEQ ID NO: 292 - protein, 15 aa, Glycine max
AIGINVPRSRFLPVK

SEQ ID NO: 293 - protein, 17 aa, Glycine max
ARENPENPSIELGPEFK

SEQ ID NO: 294 - protein, 24 aa, Glycine max
ATSDLLLVQSDLYTLEDGFVIRNK

SEQ ID NO: 295 - protein, 8 aa, Glycine max
EINGPEDL

SEQ ID NO: 296 - protein, 18 aa, Glycine max
EYVFVANSDNLGAIVDLK

SEQ ID NO: 297 - protein, 9 aa, Glycine max
ILNHLIQNK

SEQ ID NO: 298 - protein, 26 aa, Glycine max
IQTPTDEVVVPYDTLAPTPEGSSEVK

SEQ ID NO: 299 - protein, 9 aa, Glycine max
LDALLSQGK

SEQ ID NO: 300 - protein, 9 aa, Glycine max
RLVEADALK

SEQ ID NO: 301 - protein, 14 aa, Glycine max
SAVAGLNEISENEK

SEQ ID NO: 302 - protein, 12 aa, Glycine max
SIPSIVELDSLK

SEQ ID NO: 303 - protein, 17 aa, Glycine max
VLQLETAAGAAIRFFDK

SEQ ID NO: 304 - protein, 9 aa, Glycine max
VSNFLGRFK

SEQ ID NO: 305 - DNA, 1353 bp, Glycine max
  CDS (1)..(1353)
atgaccaccgccaccgagaagctctccgctctcaaatccgccgtcgccggattgaacgaaatcagtgagagtgagaagaacggattcatcagcctcgtcagccgctatctcagtggcgaagcgcagcatgtggaatggagcaagatccagacgcctacggacgaagtggttgtgccttacgacactttggcgccaactcctgatggttcttcggacgtgaagaatctattggacaagcttgtggtgttgaagctaaatggaggcttgggcacaactatgggttgcactggtcctaaatctgtaattgaagttcgtgatgggttgacatttctagatttaattgtgatccagattgagaatctcaattccaaatatggaagcaatgttcctttgcttttgatgaattcattcaacactcatgatgacactcaaaagattgttgaaaaataccaaaactccaatattgagattcatacttttaaccagggcatactgacaaggatggatggtaccctcctggcccatggagatgtctttccatcattattgaacagtggcaaacttgatgcactattgtcacagggtaaagagtatgtatttgttgccaattcagataacttgggagctatagttgacttgaaaatcttaaatcatttgatccagaacaagaatgaatactgtatggaggtgactcccaaaacattggctgatgtaaagggtggcactttgatttcttacgaaggaaggcttttggaaattgcacaagtcccagatgaacatgtcaatgagttcaagtcaatagagaagttcaaaattttcaacacaaataatttgtgggtgaacttaaatgcagttaaaaggcttgttgaagctgatgctcttaagatggaaattattcccaatccaaaggaagttgatggaataaaagttcttcagctggaaactgcagctggtgctgcaataaggttctttgacaaggctattgggattaatgttcctcgatcacgattccttcctgtgaaggcaacttcagatttgcttcttgtccagtctgacctctacactttggaagatggatttgtcattcggaacaaagctagggcaaatcctgaaaacccttctattgaacttgggccagaatttaagaaggttagcaacttcttgggccgcttcaagtcaattcccagtattgttgagcttgacagtctaaaagtggctggcaatgtatggtttggagctggtgttatcctcaagggaaaaatcagtatcgtggccaatcctggtgttaagctggaagttcccgatggtgctgtcatttcggataaggaaattaatggcccagaggacctcctg

SEQ ID NO: 306 - protein, 451 aa, Glycine max
MTTATEKLSALKSAVAGLNEISESEKNGFISLVSRYLSGEAQHVEWSKIQTPTDEVVVPYDTLAPTPDGSSDVKNLLDKLVVLKLNGGLGTTMGCTGPKSVIEVRDGLTFLDLIVIQIENLNSKYGSNVPLLLMNSFNTHDDTQKIVEKYQNSNIEIHTFNQGILTRMDGTLLAHGDVFPSLLNSGKLDALLSQGKEYVFVANSDNLGAIVDLKILNHLIQNKNEYCMEVTPKTLADVKGGTLISYEGRLLEIAQVPDEHVNEFKSIEKFKIFNTNNLWVNLNAVKRLVEADALKMEIIPNPKEVDGIKVLQLETAAGAAIRFFDKAIGINVPRSRFLPVKATSDLLLVQSDLYTLEDGFVIRNKARANPENPSIELGPEFKKVSNFLGRFKSIPSIVELDSLKVAGNVWFGAGVILKGKISIVANPGVKLEVPDGAVISDKEINGPEDLL

SEQ ID NO: 307 - protein, 15 aa, Glycine max
AIGINVPRSRFLPVK

SEQ ID NO: 308 - protein, 24 aa, Glycine max
ATSDLLLVQSDLYTLEDGFVIRNK

SEQ ID NO: 309 - protein, 18 aa, Glycine max
EYVFVANSDNLGAIVDLK

SEQ ID NO: 310 - protein, 9 aa, Glycine max
ILNHLIQNK

SEQ ID NO: 311 - protein, 26 aa, Glycine max
IQTPTDEVVVPYDTLAPTPDGSSDVK

SEQ ID NO: 312 - protein, 9 aa, Glycine max
LDALLSQGK

SEQ ID NO: 313 - protein, 12 aa, Glycine max
LEVPDGAVISDK

SEQ ID NO: 314 - protein, 9 aa, Glycine max
RLVEADALK

SEQ ID NO: 315 - protein, 14 aa, Glycine max
SAVAGLNEISESEK

SEQ ID NO: 316 - protein, 12 aa, Glycine max
SIPSIVELDSLK

SEQ ID NO: 317 - protein, 17 aa, Glycine max
VLQLETAAGAAIRFFDK

SEQ ID NO: 318 - protein, 9 aa, Glycine max
VSNFLGRFK

SEQ ID NO: 319 - DNA, 1332 bp, Glycine max
  CDS (1)..(1332)
atggatgaggagtacgatgtgatcgtgttgggcacgggtctcaaggagtgcattctcagcggtcttctctccgtcgatggcctcaaggttctgcacatggacaggaatgactattacggaggagaatccacttcgctcaatcttattcagctttggaagagattcaggggagatgacaagcctcctccacatttgggagctagcagggactataacatcgatatgaaccctaagtttattatggctaatggcaatttggtgcgggttctcatacatactgatgttactaagtatctctctttcaaagctgtggatgggagctttgtgtttaataaaggaaaggttcataaggtgcccgcaaatgacatggaggccttgaagtctccacttatggggctatttgaaaaacgccgagcacgcaagtttttcatttatgtgcaaaattacaatgagagtgatcccaagacccatgaagggatggacttgacaagagtgactactaaagagttgatagcaaaatacggtcttgatgataacactatagacttcattggtcatgctttggcgcttcatagtgatgatcgctacttggctgagccagcactggacactgtgaagagaatgaagttatatgcagagtctcttgcacgctttcaaggagggtcaccttacatatatcctttgtatggtttaggagagcttccccaggcatttgcacggcttagtgctgtttatggtgggacatatatgttgaataagcctgagtgcaaggtagaatttgatgaggaaggaaaggttgttggtgtcacatctgaaggggaaactgcaaagtgcaaaaaagttgtttgtgatccatcatatttgcccggcaaggtgaggaaggttggtagggttgcaagagcaatagccataatgagtcacccaatccccagcactgatgattcccattcggtgcaaattattttaccacagaaacagttgggtcggaagtcagacatgtacctattttgttgttcatatactcacaatgttgctccaaagggaaaatttattgcatttgtatcaaccgaggcagagacagatcagccagcaattgaactaaaacctggaattgaccttctaggacctgttgatgagatattttttgatatctatgacagatatgaaccggtcaatgaacccactttggacaactgctttgtatcaacaagttatgatgctactactcactttgagtcgaccgtggatgatgttctcaacatgtatacattgataactggaaaggttattgacctgagtgtggatcttagtgctgctagtgctgcagaagag

SEQ ID NO: 320 - protein, 444 aa, Glycine max
MDEEYDVIVLGTGLKECILSGLLSVDGLKVLHMDRNDYYGGESTSLNLIQLWKRFRGDDKPPPHLGASRDYNIDMNPKFIMANGNLVRVLIHTDVTKYLSFKAVDGSFVFNKGKVHKVPANDMEALKSPLMGLFEKRRARKFFIYVQNYNESDPKTHEGMDLTRVTTKELIAKYGLDDNTIDFIGHALALHSDDRYLAEPALDTVKRMKLYAESLARFQGGSPYIYPLYGLGELPQAFARLSAVYGGTYMLNKPECKVEFDEEGKVVGVTSEGETAKCKKVVCDPSYLPGKVRKVGRVARAIAIMSHPIPSTDDSHSVQIILPQKQLGRKSDMYLFCCSYTHNVAPKGKFIAFVSTEAETDQPAIELKPGIDLLGPVDEIFFDIYDRYEPVNEPTLDNCFVSTSYDATTHFESTVDDVLNMYTLITGKVIDLSVDLSAASAAEE

SEQ ID NO: 321 - protein, 10 aa, Glycine max
AVDGSFVFNK

SEQ ID NO: 322 - protein, 14 aa, Glycine max
FFIYVQNYNESDPK

SEQ ID NO: 323 - protein, 8 aa, Glycine max
VEFDEEGK

SEQ ID NO: 324 - protein, 16 aa, Glycine max
VIDLSVDLSAASAAEE

SEQ ID NO: 325 - protein, 12 aa, Glycine max
VVGVTSEGETAK

SEQ ID NO: 326 - DNA, 1332 bp, Glycine max
  CDS (1)..(1332)
atggatgaggagtacgatgtgatcgtgttgggcacgggtctcaaggagtgcattctcagcggtcttctctccgtcgatggcctcaaggttctgcatatggataggaacgactattacggaggagaatccacttcgctcaatcttattcagctttggaagagattcaggggagatgacaagcctcctccacatttgggcgctagcagggactacaacatcgatatgaaccccaagtttattatggctaatggcaatttggtgcgggttctcatacataccgatgttacaaagtatctctatttcaaagctgtggatgggagctatgtgtttaataaaggaaaggttcataaggtgcctgcaaacgacatggaggccttgaagtccccacttatggggctatttgaaaaacgccgggcacgcaagtttttcatttatgtgcaaaactacaacgagagcgatcccaagacccacgaggggatggacttgacaagagtgactactaaagagttgatagcaaaatacggccttgatgacaacactatagacttcattggtcatgctttggcgcttcatagcgatgatcgctacttggctgagccagcactggacaccgtgaagagaatgaagttatatgcagagtctcttgcacgctttcaaggagggtcaccttacatatatcctttgtatggtttaggagagcttccccaggcatttgcacggcttagtgctgtttatggtggaacatatatgttgaataagcctgagtgcaaggtagaatttgatgaggaaggaaaggttgttggtgttacatctgaaggggaaactgcaaagtgtaaaaaagttgtttgtgatccatcatatttgcctggcaaggtgaggaaggttggtagggttgcaagggcgatagccatcatgagccacccaatccccagcactgatgattcccattcagtgcaaattattttaccacagaaacagttgggtcggaagtcagacatgtacctattttgttgttcgtatactcacaatgttgctccaaagggaaaatttattgcatttgtatcaactgaggcagagacagatcagccggcaattggactgaaacctggaattgaccttctaggacctgttgatgagatattttttgatatctatgacagatatgaaccagtcaacgaacccactttggacaactgctttatatcaacaagttatgatgctactactcactttgagtcgactgtggatgacgttctcaacatgtatacattgataactggaaaggttattgacctcagtgtggatcttagtgctgctagtgctgcagaagag

SEQ ID NO: 327 - protein, 444 aa, Glycine max
MDEEYDVIVLGTGLKECILSGLLSVDGLKVLHMDRNDYYGGESTSLNLIQLWKRFRGDDKPPPHLGASRDYNIDMNPKFIMANGNLVRVLIHTDVTKYLYFKAVDGSYVFNKGKVHKVPANDMEALKSPLMGLFEKRRARKFFIYVQNYNESDPKTHEGMDLTRVTTKELIAKYGLDDNTIDFIGHALALHSDDRYLAEPALDTVKRMKLYAESLARFQGGSPYIYPLYGLGELPQAFARLSAVYGGTYMLNKPECKVEFDEEGKVVGVTSEGETAKCKKVVCDPSYLPGKVRKVGRVARAIAIMSHPIPSTDDSHSVQIILPQKQLGRKSDMYLFCCSYTHNVAPKGKFIAFVSTEAETDQPAIGLKPGIDLLGPVDEIFFDIYDRYEPVNEPTLDNCFISTSYDATTHFESTVDDVLNMYTLITGKVIDLSVDLSAASAAEE

SEQ ID NO: 328 - protein, 10 aa, Glycine max
AVDGSYVFNK

SEQ ID NO: 329 - protein, 14 aa, Glycine max
FFIYVQNYNESDPK

SEQ ID NO: 330 - protein, 8 aa, Glycine max
VEFDEEGK

SEQ ID NO: 331 - protein, 16 aa, Glycine max
VIDLSVDLSAASAAEE

SEQ ID NO: 332 - protein, 12 aa, Glycine max
VVGVTSEGETAK

SEQ ID NO: 333 - DNA, 1512 bp, Glycine max
  CDS (1)..(1512)
atggcgatgagaaccaaactttctttagctatctttttcttttttcttttagccttattttcaaacctagcctttggcaaatgtaaagaaaccgaggtagaagaagaagaccctgagctcgtaacatgcaaacaccaatgccaacagccacagcaatacactgagggtgacaagcgggtatgcttgcaaagatgtgacaggtatcatcgtatgaagcaagagcgagagaaacaaatccaagaggaaactcgtgagaagaaagaggaggaaagccgtgaaagggaagaagaacaacaagagcagcatgaggaacaagatgaaaatccctacatttttgaggaagataaggattttgagaccagagtcgaaactgaaggtggcagaattcgggttctcaagaagttcactgaaaaatccaagcttcttcagggcattgagaacttccgtttggccattttggaagctagagcacacacgttcgtgtctcctcgccactttgattccgaggttgtttttttcaacatcaaggggcgagccgtacttgggttggtgagtgaaagtgaaacagaaaaaatcacccttgaacctggggacatgatacacataccagctggcaccccactgtacatcgttaacagagatgagaatgataagctcttccttgccatgctccatatacctgtctctgtctctactcctggaaaatttgaggaatttttcgggcctggaggacgagacccagaatcggtcctctcagcattcagctggaatgtgctgcaagctgcgctccaaaccccaaaaggaaagttagaaaagctttttgatcaacagaacgagggaagtattttcgcaataagcagagaacaggtgcgtgcgttggcccctaccaagaaaagctcttggtggccattcggtggcgaatccaagcctcaattcaatattttcagcaagcgtcccactatctccaacggatatggtcgtttaactgaagttggtcctgacgatgatgaaaagagttggcttcaaagactcaatctcatgcttacctttaccaacatcacccagagatctatgagtactattcactacaactcacatgcaacgaagatagcactggtgatcgatggcagagggcatcttcaaatatcatgtccacacatgtcatcaaggtcgtcacactcgaagcatgataagagtagcccttcataccatagaatcagttccgatttgaagcctggaatggtgtttgttgtccctcccggtcatcccttcgtcaccatagcttccaataaagagaatctcctcatgatttgcttcgaggttaacgctcgagacaacaagaagtttacatttgcagggaaggacaacattgtgagttctctggacaacgttgctaaggagcttgcctttaactatccttctgagatggtgaacggagtattcgaccgaaaggagagtttctttttcccttttgagttgccgagagaggagcgtggtcgtcgcgctgatgcg

SEQ ID NO: 334 - protein, 504 aa, Glycine max
MAMRTKLSLAIFFFFLLALFSNLAFGKCKETEVEEEDPELVTCKHQCQQPQQYTEGDKRVCLQRCDRYHRMKQEREKQIQEETREKKEEESREREEEQQEQHEEQDENPYIFEEDKDFETRVETEGGRIRVLKKFTEKSKLLQGIENFRLAILEARAHTFVSPRHFDSEVVFFNIKGRAVLGLVSESETEKITLEPGDMIHIPAGTPLYIVNRDENDKLFLAMLHIPVSVSTPGKFEEFFGPGGRDPESVLSAFSWNVLQAALQTPKGKLEKLFDQQNEGSIFAISREQVRALAPTKKSSWWPFGGESKPQFNIFSKRPTISNGYGRLTEVGPDDDEKSWLQRLNLMLTFTNITQRSMSTIHYNSHATKIALVIDGRGHLQISCPHMSSRSSHSKHDKSSPSYHRISSDLKPGMVFVVPPGHPFVTIASNKENLLMICFEVNARDNKKFTFAGKDNIVSSLDNVAKELAFNYPSEMVNGVFDRKESFFFPFELPREERGRRADA

SEQ ID NO: 335 - protein, 17 aa, Glycine max
DFETRVETEGGRIRVLK

SEQ ID NO: 336 - protein, 12 aa, Glycine max
DNIVSSLDNVAK

SEQ ID NO: 337 - protein, 15 aa, Glycine max
GRAVLGLVSESETEK

SEQ ID NO: 338 - protein, 25 aa, Glycine max
LFDQQNEGSIFAISREQVRALAPTK

SEQ ID NO: 339 - protein, 21 aa, Glycine max
RPTISNGYGRLTEVGPDDDEK

SEQ ID NO: 340 - DNA, 1467 bp, Glycine max
  CDS (1)..(1467)
atggcgaccagagccaagctttctttagctatcttccttttctttcttttagccttgatttcaaacctagccttgggcaaacttaaagaaaccgaggtcgaagaagatcccgagctcgtaacatgcaaacaccagtgccaacagcaacggcaatacactgagagtgacaagcgaacatgcttgcaacaatgtgacagtatgaagcaagagcgagagaaacaagtcgaagaggaaactcgcgagaaggaagaagaacatcaagagcagcatgaggaggagcaagaccaaaatccctacgtttttgaagaagataaggatttttcgaccagagtcgaaacagaaggtggcagcattcgggttctcaagaagttcactgagaaatccaagcttcttcaaggcaatgagaatttccgtttggccatcttagaagctagagcacacacgttcgtgtccccacgccactttgattccgaggttgtcttgttcaacattaaggggagagccgtacttgggttggtgagggaaagtgaaacagaaaaaatcaccctagaacctggagacatgatacacataccagcaggcacaccactgtacatcgttaacagagatgagaatgagaagctcctccttgccatgctccatatacctgtctctactcctggaaaatttgaggaatttttcgggcctggaggacgagacccagaatcggtcctctcagcattcagctggaatgtgctgcaagctgcgctccaaaccccaaaaggaaagttagaaaggctttttaatcaacagaacgagggaagtattttcaaaataagcagagaacgggtgcgtgcgttggcccccaccaagaaaagctcttggtggccattcggcggcgaatccaaggctcaattcaatattttcagcaagcgtcccactttctccaacggatatggccgtttaactgaagttggtcctgatgatgaaaagagttggcttcaaagactcaacctcatgcttacctttaccaacatcacccagagatctatgagtactattcactacaactcacatgcaacgaagatagcactggtgatggatggtagagggcatcttcaaatatcatgtccacacatgtcatcaaggtcagactcaaagcatgataagagtagcccctcataccatagaatcagtgcggacttgaagcctggaatggtgtttgttgtccctcctggtcatcccttcgtcactatagcttccaataaagagaatctcctcataatttgcttcgaggttaacgttcgagacaacaagaagtttacgtttgcagggaaggacaacattgtgagctctctggacaacgtagctaaggagctggcctttaactatccttctgagatggtgaacggagtcttcgaaagaaaggagagtctctttttccccttcgagttgccgagcgaggagcgtggtcgtcgcgctgttgcg

SEQ ID NO: 341 - protein, 489 aa, Glycine max
MATRAKLSLAIFLFFLLALISNLALGKLKETEVEEDPELVTCKHQCQQQRQYTESDKRTCLQQCDSMKQEREKQVEEETREKEEEHQEQHEEEQDQNPYVFEEDKDFSTRVETEGGSIRVLKKFTEKSKLLQGNENFRLAILEARAHTFVSPRHFDSEVVLFNIKGRAVLGLVRESETEKITLEPGDMIHIPAGTPLYIVNRDENEKLLLAMLHIPVSTPGKFEEFFGPGGRDPESVLSAFSWNVLQAALQTPKGKLERLFNQQNEGSIFKISRERVRALAPTKKSSWWPFGGESKAQFNIFSKRPTFSNGYGRLTEVGPDDEKSWLQRLNLMLTFTNITQRSMSTIHYNSHATKIALVMDGRGHLQISCPHMSSRSDSKHDKSSPSYHRISADLKPGMVFVVPPGHPFVTIASNKENLLIICFEVNVRDNKKFTFAGKDNIVSSLDNVAKELAFNYPSEMVNGVFERKESLFFPFELPSEERGRRAVA

SEQ ID NO: 342 - protein, 8 aa, Glycine max
AQFNIFSK

SEQ ID NO: 343 - protein, 17 aa, Glycine max
DFSTRVETEGGSIRVLK

SEQ ID NO: 344 - protein, 12 aa, Glycine max
DNIVSSLDNVAK

SEQ ID NO: 345 - protein, 15 aa, Glycine max
GRAVLGLVRESETEK

SEQ ID NO: 346 - protein, 20 aa, Glycine max
RPTFSNGYGRLTEVGPDDEK

SEQ ID NO: 347 - DNA, 1266 bp, Glycine max
  CDS (1)..(1266)
atggtgagaggattgctcaacaagctcgtctctcgctccctctcggtcgccggaaaatggcagcacaatcaactccgccgcctcaacatccacgagtaccagggtgctgaattgatgagcaaacacggagtcaacgttccgagaggcgtggctgtttcctctgttgaagaggccagaaaggtcatcaaggaccttttccctaatgaaaatgagttggtggttaagagtcaaattttagccggcggacgaggtttgggaactttcaaaagcggccttaagggaggagtgcacattgttaagactgaccaggttgaagacatagctgggaagatgcttggacagatactagttaccaaacagactggtcctcagggaaaaatagttagcaaggtttacttgtgtgaaaagctgtcacttgtaaatgagatgtactttgctataacactggatcgtacgagtgctggtccaattataattgcttgtagtaagggaggaaccagcattgaagaccttgcagagaaatttccggacatgattataaaggtacctgttgatgtttttgaaggtattactgatgaaggtgctgcaaaggttgttgatggtttggctctcaaagtggctgatagaaataagtcgattgaacaagtgaagaatttgtataaactttttgttgattgtgactgcactcttttggaaatcaatcccatagcggagacagctgataaccaattggtggctgctgatgctaagttgaattttgatgataatgctgcatatcgccagaaagagatattttctctccgtgatacaacacaagaggaccctcgagaggtgactgctgcaaaggcagatttaaattatattgggttagatggagaaattggctgcatggtgaatggagcagggttagcaatggccacaatggatataattaaattgcatgggggtactcctgccaattttctggatgtaggtggcaatgcctctgaaaaccaggttgttgaggcatttaaaatattgactgctgatgacaaagtgaaggcaattttggttaacatttttggtggtataatgaagtgtgatgttatagcaagtggaatagtgaatgctgcaaaagaggttgcactgaaagtaccagttgtagttcgtctggaaggcaccaatgttgatcaaggaaaaagaatattgaaggaaagtggtatggcattaataacggctgaagatttagatgatgcagctcagaaagcagtgaaagctgcttacaaa

SEQ ID NO: 348 - protein, 422 aa, Glycine max
MVRGLLNKLVSRSLSVAGKWQHNQLRRLNIHEYQGAELMSKHGVNVPRGVAVSSVEEARKVIKDLFPNENELVVKSQILAGGRGLGTFKSGLKGGVHIVKTDQVEDIAGKMLGQILVTKQTGPQGKIVSKVYLCEKLSLVNEMYFAITLDRTSAGPIIIACSKGGTSIEDLAEKFPDMIIKVPVDVFEGITDEGAAKVVDGLALKVADRNKSIEQVKNLYKLFVDCDCTLLEINPIAETADNQLVAADAKLNFDDNAAYRQKEIFSLRDTTQEDPREVTAAKADLNYIGLDGEIGCMVNGAGLAMATMDIIKLHGGTPANFLDVGGNASENQVVEAFKILTADDKVKAILVNIFGGIMKCDVIASGIVNAAKEVALKVPVVVRLEGTNVDQGKRILKESGMALITAEDLDDAAQKAVKAAYK

SEQ ID NO: 349 - protein, 12 aa, Glycine max
DLFPNENELVVK

SEQ ID NO: 350 - protein, 20 aa, Glycine max
EIFSLRDTTQEDPREVTAAK

SEQ ID NO: 351 - protein, 26 aa, Glycine max
LHGGTPANFLDVGGNASENQVVEAFK

SEQ ID NO: 352 - protein, 12 aa, Glycine max
LNFDDNAAYRQK

SEQ ID NO: 353 - protein, 14 aa, Glycine max
SQILAGGRGLGTFK

SEQ ID NO: 354 - protein, 10 aa, Glycine max
TDQVEDIAGK

SEQ ID NO: 355 - protein, 16 aa, Glycine max
VPVVVRLEGTNVDQGK

SEQ ID NO: 356 - protein, 8 aa, Glycine max
VVDGLALK

SEQ ID NO: 357 - DNA, 1266 bp, Glycine max
  CDS (1)..(1266)
atggtgaggggattgctcaacaagctcgtctctcgctccctctccgtcgccggaaaatggcagcacaaccaactccgccgcctcaacatccacgagtaccagggcgctgaattgatgagcaaacacggagttaatgttccgagaggcgtggctgtttcctctgttgaagaggtcagaaaggccatcaaggaccttttccctaatgaaaatgagttggtggttaagagtcaaattttagccggtggaagaggtttgggaactttcaaaagcggccttaagggaggagtgcacattgttaagactgaccaggttgaagacatagctgggaagatgcttgggcagatactagttaccaaacagactggtcctcagggaaaaatagttagcaaggtttacttgtgtgaaaagctgtcactagtaaatgagatgtactttgctataacactggatcgtacgagtgctggtccaattataattgcttgtagtaagggaggaaccagcattgaagacctagcagagaaatttccggacatgattataaaggtacctgttgatgtttttgaaggaattactgatgaagatgctgcaaaggttgttgatggtttggctctcaaagtggctgatagaaataagtcgattgaacaagtgaagaatttgtataaactttttgttgattgtgactgcacccttttggaaatcaatcccattgcggagacagctgataaccaattggtggctgctgatgctaagttgaattttgacgataatgctgcatatcgccagaaagagatatttgctctccgtgatacaacacaagaggaccctcgagaggtgactgctgcaaaggcagacttaaattatattgggttagatggagaaataggctgcatggtgaatggagcagggttagcaatggccacaatggatataattaaattgcatgggggtactcctgccaattttttggatgtaggtggcaatgcctctgaaggccaggtggttgaggcatttaaaatattgactgctgatgacaaagtgaaggcaattttggttaacatttttgggggtataatgaagtgtgatgttatagcaagtggaatagtgaatgctgcaaaagaggttgcactgaaagtacccgtagtagttcgtctggaaggcaccaatgttgatcatggaaaaagaattttgaaggaaagtggtatggcgttgataacggctgaagatttagatgatgctgctcagaaagcagtgaaagctgcttacaaa

SEQ ID NO: 358 - protein, 422 aa, Glycine max
MVRGLLNKLVSRSLSVAGKWQHNQLRRLNIHEYQGAELMSKHGVNVPRGVAVSSVEEVRKAIKDLFPNENELVVKSQILAGGRGLGTFKSGLKGGVHIVKTDQVEDIAGKMLGQILVTKQTGPQGKIVSKVYLCEKLSLVNEMYFAITLDRTSAGPIIIACSKGGTSIEDLAEKFPDMIIKVPVDVFEGITDEDAAKVVDGLALKVADRNKSIEQVKNLYKLFVDCDCTLLEINPIAETADNQLVAADAKLNFDDNAAYRQKEIFALRDTTQEDPREVTAAKADLNYIGLDGEIGCMVNGAGLAMATMDIIKLHGGTPANFLDVGGNASEGQVVEAFKILTADDKVKAILVNIFGGIMKCDVIASGIVNAAKEVALKVPVVVRLEGTNVDHGKRILKESGMALITAEDLDDAAQKAVKAAYK

SEQ ID NO: 359 - protein, 12 aa, Glycine max
DLFPNENELVVK

SEQ ID NO: 360 - protein, 20 aa, Glycine max
EIFALRDTTQEDPREVTAAK

SEQ ID NO: 361 - protein, 26 aa, Glycine max
LHGGTPANFLDVGGNASEGQVVEAFK

SEQ ID NO: 362 - protein, 12 aa, Glycine max
LNFDDNAAYRQK

SEQ ID NO: 363 - protein, 14 aa, Glycine max
SQILAGGRGLGTFK

SEQ ID NO: 364 - protein, 10 aa, Glycine max
TDQVEDIAGK

SEQ ID NO: 365 - protein, 8 aa, Glycine max
VVDGLALK

SEQ ID NO: 366 - DNA, 1203 bp, Glycine max
  CDS (1)..(1203)
atggcgactaagaggagcgtgggaacgttgaaggagggtgatttgaaggggaagagggtattcgtgagggtcgatctgaacgtgcctttggatgacaaccttaacatcaccgatgacactagagtccgtgctgctgttcccaccatcaagtacttgactggttatggtgctaaagtgatcctttctagccatttgggacgtccaaaaggtgtaacacctaaatacagtttgaagcctcttgtgccaaggctgtctcaacttcttggaattgaggttacgatggccaatgactctattggggaggaagttgaaaagttggttacacaacttccagaaggtggtgttttgcttctagagaatgtgaggttctacaaggaggaagagaagaatgatcctgaatttgcaaagaagttggcttctctagctgatctctatgtgaatgatgcatttggcactgcccacagagctcatgcttctacagaaggagttgccaaatacttgaagccctctgttgcaggattcctaatgcagaaggagcttgattatctagttggggctgtgtcaaaccccaagagaccatttgctgctattgtcggtggatcgaaggtgtcttccaagattggagttattgaatccttgttggagaaagttaatgttctcttgcttggtggaggaatgatctttaccttttacaaggctcagggttattcagttgggtcatctcttgtggaggaagacaagcttagccttgcaactacacttcttgaaaaggccaaggctaaaggggtttctttgttgcttccaactgatgttgtcatagcagacaagtttgctgctgatgctaacagcaagactgtgccggcatcaagcatcccagatgggtggatggggttggatattggtcctgattccatcaagacatttggtgaagcattggatacgactcagaccattatttggaatggaccaatgggtgtttttgagtttgataagtttgccacaggaacagaggctatagccaagaaactggcagagctgagtgggaagggagtgacaaccatcattggaggaggtgactccgttgccgctgtggagaaggttggacttgcagacaagatgagccacatctccactggtggtggtgccagcttagagcttcttgagggaaagcaactccctggtgtccttgctcttgatgatgct

SEQ ID NO: 367 - protein, 401 aa, Glycine max
MATKRSVGTLKEGDLKGKRVFVRVDLNVPLDDNLNITDDTRVRAAVPTIKYLTGYGAKVILSSHLGRPKGVTPKYSLKPLVPRLSQLLGIEVTMANDSIGEEVEKLVTQLPEGGVLLLENVRFYKEEEKNDPEFAKKLASLADLYVNDAFGTAHRAHASTEGVAKYLKPSVAGFLMQKELDYLVGAVSNPKRPFAAIVGGSKVSSKIGVIESLLEKVNVLLLGGGMIFTFYKAQGYSVGSSLVEEDKLSLATTLLEKAKAKGVSLLLPTDVVIADKFAADANSKTVPASSIPDGWMGLDIGPDSIKTFGEALDTTQTIIWNGPMGVFEFDKFATGTEAIAKKLAELSGKGVTTIIGGGDSVAAVEKVGLADKMSHISTGGGASLELLEGKQLPGVLALDDA

SEQ ID NO: 368 - protein, 15 aa, Glycine max
AQGYSVGSSLVEEDK

SEQ ID NO: 369 - protein, 13 aa, Glycine max
ELDYLVGAVSNPK

SEQ ID NO: 370 - protein, 8 aa, Glycine max
FAADANSK

SEQ ID NO: 371 - protein, 10 aa, Glycine max
FATGTEAIAK

SEQ ID NO: 372 - protein, 15 aa, Glycine max
GVSLLLPTDVVIADK

SEQ ID NO: 373 - protein, 17 aa, Glycine max
GVTTIIGGGDSVAAVEK

SEQ ID NO: 374 - protein, 10 aa, Glycine max
IGVIESLLEK

SEQ ID NO: 375 - protein, 28 aa, Glycine max
LASLADLYVNDAFGTAHRAHASTEGVAK

SEQ ID NO: 376 - protein, 10 aa, Glycine max
LSLATTLLEK

SEQ ID NO: 377 - protein, 20 aa, Glycine max
LVTQLPEGGVLLLENVRFYK

SEQ ID NO: 378 - protein, 7 aa, Glycine max
NDPEFAK

SEQ ID NO: 379 - protein, 11 aa, Glycine max
QLPGVLALDDA

SEQ ID NO: 380 - protein, 11 aa, Glycine max
RPFAAIVGGSK

SEQ ID NO: 381 - protein, 11 aa, Glycine max
VILSSHLGRPK

SEQ ID NO: 382 - protein, 8 aa, Glycine max
YLTGYGAK

SEQ ID NO: 383 - DNA, 1455 bp, Glycine max
  CDS (1)..(1455)
atggcctcagccgcatcccccaccactttctctctcctccactccgccaccccttcctcctcctccaccgccacctccgcctccccctccccctcgcgcgtgcagctcacctcctccctccgcgcccgcccgctgcgccgcctgggcttcgccgcggcggacccgctgctcgcggcgagtgtagcggcgcgcgtggcggcggtgagaggaggaggaaagggcgcgaggggggtggtgtcgatggcgaagaagagcgtgggggacctgagcgcggcggacctgaaggggaagaaggtcttcgtcagggccgacctcaacgtcccgctcgacgacaaccagaacatcaccgacgacaccagaatccgcgccgccattcccaccatcaaacatctcatccaaaacggcgccaaagtcattctctccagccacttggggcggccgaagggtgtcactcccaaatacagcttggcgcctcttgtaccccggctttctgagctcattggtatccagattgtcaaggccgaggacagtattggtccagaagtagaaaagttggtggcttctcttccagatggaggtgttctccttctagaaaatgtgaggttttacaaggaggaagaaaagaatgaccccgagcatgcaaaaaagcttgcctctctggcagatctgtatgtgaatgatgcatttggtactgctcacagggcacatgcatcaacagagggtgttactaaatacctgaagccatctgttgctggttttcttttgcaaaaggaacttgattaccttgttggggcagtatcaaaccccaaaaggccatttgctgccattgttggtggttccaaagtctcatctaaaattggagtgattgagtcacttttagaaaaagttgacatccttcttcttggtggaggaatgatcttcacattttacaaggcacaaggtctttcagtgggttcatcccttgtagaagaagataagttggatcttgctacatcactacttgcaaaagccaaggaaaagggggtgtctctcttgttaccaagtgatgtggtgattgcagacaaatttgctcctgatgctaatagcaaggtcgtgccagcatctgccatccctgatggctggatgggattggatattggtccagattctgttaaatcattcagtgaagcattggatactacccaaaccatcatatggaatggaccaatgggagtgtttgagtttgacaagtttgctgttggtacagaggctattgcaaagaagctggctgacctcagtggaaagggggtgaccacaattattggaggaggagattctgttgcagctgtggagaaagtaggagttgctagtgtcatgagccacatatctactggtggtggtgccagtttggagttattggaaggcaaagagcttccaggagtccttgctcttgatgaagccgtcccagtcgctgtg

SEQ ID NO: 384 - protein, 485 aa, Glycine max
MASAASPTTFSLLHSATPSSSSTATSASPSPSRVQLTSSLRARPLRRLGFAAADPLLAASVAARVAAVRGGGKGARGVVSMAKKSVGDLSAADLKGKKVFVRADLNVPLDDNQNITDDTRIRAAIPTIKHLIQNGAKVILSSHLGRPKGVTPKYSLAPLVPRLSELIGIQIVKAEDSIGPEVEKLVASLPDGGVLLLENVRFYKEEEKNDPEHAKKLASLADLYVNDAFGTAHRAHASTEGVTKYLKPSVAGFLLQKELDYLVGAVSNPKRPFAAIVGGSKVSSKIGVIESLLEKVDILLLGGGMIFTFYKAQGLSVGSSLVEEDKLDLATSLLAKAKEKGVSLLLPSDVVIADKFAPDANSKVVPASAIPDGWMGLDIGPDSVKSFSEALDTTQTIIWNGPMGVFEFDKFAVGTEAIAKKLADLSGKGVTTIIGGGDSVAAVEKVGVASVMSHISTGGGASLELLEGKELPGVLALDEAVPVAV

SEQ ID NO: 385 - protein, 13 aa, Glycine max
ELDYLVGAVSNPK

SEQ ID NO: 386 - protein, 16 aa, Glycine max
ELPGVLALDEAVPVAV

SEQ ID NO: 387 - protein, 10 aa, Glycine max
FAVGTEAIAK

SEQ ID NO: 388 - protein, 15 aa, Glycine max
GVSLLLPSDVVIADK

SEQ ID NO: 389 - protein, 17 aa, Glycine max
GVTTIIGGGDSVAAVEK

SEQ ID NO: 390 - protein, 10 aa, Glycine max
IGVIESLLEK

SEQ ID NO: 391 - protein, 11 aa, Glycine max
RPFAAIVGGSK

SEQ ID NO: 392 - protein, 11 aa, Glycine max
VILSSHLGRPK

SEQ ID NO: 393 - DNA, 1203 bp, Glycine max
  CDS (1)..(1203)
atggcgactaagaggagcgtgggaacgttgaaggagggtgatttgaaagggaagagggtgttcgtgagggtcgatctgaacgtgcctttggatgacaaccttaacatcaccgatgacactagagtccgtgctgctgttcccaccatcaagtacttaactggtcatggagccaaagtgatcctttctagccacttgggacgtcctaaaggtgtaacacctaaatacagtttgaagcctcttgtgccaaggctgtctcaacttctcggaattgaggttacgatggcaaatgactctattggggaggaagttgagaagttggttgcacaacttccagaaggtggtgttttgcttctagagaatgtgaggttctataaggaggaagagaagaatgaccctgagtttgcaaagaagttggcttctcttgctgatctctacgtgaatgatgctttcggcactgcccacagagctcatgcttctacagaaggagtggccaaatacttgaagccctctgttgcaggattccttatgcagaaggaacttgactatctagttggagctgtgtcaaaccccaagagaccatttgctgctatcgttggtgggtcaaaggtgtcttccaagattggagttattgagtccttgttggagaaagttaacgttctcttgcttggtggaggaatgatctttaccttttacaaggctcagggttattcagttggttcatctcttgtggaggaagacaagcttagccttgcaactacacttctcgaaaaggccaaggctaaaggggtttctttgttgcttccaactgatgtggtcatagcagacaagtttgctgctgatgctaacagcaagactgtgccagcatcaagcatcccagacgggtggatgggattagatattggtcccgattccatcaagacatttggtgaagcattggataagacccagaccgtcatttggaatggaccaatgggtgtttttgagtttgataagtttgccacaggaacagaggccatagccaagaaactggcagagctgagtgggaagggagtaacgaccatcattggaggaggtgactctgttgccgctgtggagaaggttggtcttgcagacaagatgagccacatctccactggtggtggtgccagcttagagcttcttgaggggaagcaactccctggtgtccttgcccttgatgatgct

SEQ ID NO: 394 - protein, 401 aa, Glycine max
MATKRSVGTLKEGDLKGKRVFVRVDLNVPLDDNLNITDDTRVRAAVPTIKYLTGHGAKVILSSHLGRPKGVTPKYSLKPLVPRLSQLLGIEVTMANDSIGEEVEKLVAQLPEGGVLLLENVRFYKEEEKNDPEFAKKLASLADLYVNDAFGTAHRAHASTEGVAKYLKPSVAGFLMQKELDYLVGAVSNPKRPFAAIVGGSKVSSKIGVIESLLEKVNVLLLGGGMIFTFYKAQGYSVGSSLVEEDKLSLATTLLEKAKAKGVSLLLPTDVVIADKFAADANSKTVPASSIPDGWMGLDIGPDSIKTFGEALDKTQTVIWNGPMGVFEFDKFATGTEAIAKKLAELSGKGVTTIIGGGDSVAAVEKVGLADKMSHISTGGGASLELLEGKQLPGVLALDDA

SEQ ID NO: 395 - protein, 15 aa, Glycine max
AQGYSVGSSLVEEDK

SEQ ID NO: 396 - protein, 13 aa, Glycine max
ELDYLVGAVSNPK

SEQ ID NO: 397 - protein, 8 aa, Glycine max
FAADANSK

SEQ ID NO: 398 - protein, 10 aa, Glycine max
FATGTEAIAK

SEQ ID NO: 399 - protein, 15 aa, Glycine max
GVSLLLPTDVVIADK

SEQ ID NO: 400 - protein, 17 aa, Glycine max
GVTTIIGGGDSVAAVEK

SEQ ID NO: 401 - protein, 10 aa, Glycine max
IGVIESLLEK

SEQ ID NO: 402 - protein, 28 aa, Glycine max
LASLADLYVNDAFGTAHRAHASTEGVAK

SEQ ID NO: 403 - protein, 10 aa, Glycine max
LSLATTLLEK

SEQ ID NO: 404 - protein, 20 aa, Glycine max
LVAQLPEGGVLLLENVRFYK

SEQ ID NO: 405 - protein, 7 aa, Glycine max
NDPEFAK

SEQ ID NO: 406 - protein, 11 aa, Glycine max
QLPGVLALDDA

SEQ ID NO: 407 - protein, 11 aa, Glycine max
RPFAAIVGGSK

SEQ ID NO: 408 - protein, 8 aa, Glycine max
TFGEALDK

SEQ ID NO: 409 - protein, 11 aa, Glycine max
VILSSHLGRPK

SEQ ID NO: 410 - DNA, 1143 bp, Glycine max
  CDS (1)..(1143)
atgtcgtcgagcacagttggtcaagtcatcaaatgcaaagctgcggtttcatgggaggcagggaagccacttgtgattgaagaagtagaggtggcaccaccacaagctggtgaagtgcgtttgaagatcctctacacctctctttgccacactgatgtttacttctgggaagccaagggccaaactccattgtttcctcgtatatttggtcatgaagctggagggattgtggagagcgtaggtgagggtgtgactcatctcaaaccaggggaccatgccctcccagtgtttaccggggagtgtggagaatgccctcattgcaagtcagaggagagcaacatgtgtgatcttctcaggatcaacactgataggggtgtcatgatccatgacagccaaacaagattttctattaagggacaacctatttaccattttgttggtacctccacattcagtgaatacactgttgttcatgccggatgtgttgccaaagtcaaccctgctgccccacttgacaaaatttgtgttctcagttgtggaatttgcacaggtcttggggctactatcaatgttgcaaaaccaaaacctggttcttctgttgccatttttggacttggagctgttggccttgctgctgctgaaggggcaaggatttctggtgcatcaagaattattggggttgatttagtttctagcagatttgaagaagctaagaagtttggggtcaatgaatttgtgaacccaaaagaccatgacaagcctgtacaagaggtgattgctgcaatgacgaatgggggtgtggatcgtgctgttgaatgtactggcagcatccaagccatgatctcggcattcgaatgcgtccacgatggttggggtgttgctgtacttgttggagtgccaaacaaagatgatgcattcaaaactcatccagtgaatttcttgaacgagagaactctaaagggtaccttctacggaaactacaaaccccgcactgatcttccttctgttgtggagaagtacatgaatggggaattggaactggagaaattcatcactcacacagttccattctcagagattaacaaggcttttgattacatgctgaaaggggagtccatcagatgcatcattcgaatgggggag

SEQ ID NO: 411 - protein, 381 aa, Glycine max
MSSSTVGQVIKCKAAVSWEAGKPLVIEEVEVAPPQAGEVRLKILYTSLCHTDVYFWEAKGQTPLFPRIFGHEAGGIVESVGEGVTHLKPGDHALPVFTGECGECPHCKSEESNMCDLLRINTDRGVMIHDSQTRFSIKGQPIYHFVGTSTFSEYTVVHAGCVAKVNPAAPLDKICVLSCGICTGLGATINVAKPKPGSSVAIFGLGAVGLAAAEGARISGASRIIGVDLVSSRFEEAKKFGVNEFVNPKDHDKPVQEVIAAMTNGGVDRAVECTGSIQAMISAFECVHDGWGVAVLVGVPNKDDAFKTHPVNFLNERTLKGTFYGNYKPRTDLPSVVEKYMNGELELEKFITHTVPFSEINKAFDYMLKGESIRCIIRMGE

SEQ ID NO: 412 - protein, 10 aa, Glycine max
FGVNEFVNPK

SEQ ID NO: 413 - protein, 13 aa, Glycine max
FITHTVPFSEINK

SEQ ID NO: 414 - protein, 19 aa, Glycine max
GTFYGNYKPRTDLPSVVEK

SEQ ID NO: 415 - protein, 13 aa, Glycine max
THPVNFLNERTLK

SEQ ID NO: 416 - protein, 9 aa, Glycine max
VNPAAPLDK

SEQ ID NO: 417 - DNA, 1113 bp, Glycine max
  CDS (1)..(1113)
atgcgtgcagctgcggtggcatgggaagcagggaagccactgtcaatagaaaccatagaagtggcaccaccccagaaaggtgaagtgcgtttgaggatcctcttcaactccctttgccgtagtgatgtttattggtgggatgctaaggaccagactcctctgtttcctcgtatcttaggccacgaagcttcagggattgtggagagcgtgggcgagggtgtgacacatctgaaaccaggtgaccatgcactcccaatattcactggggagtgtggtgaatgcacttattgtaagtctgaagagagcaacctgtgtgagctactcaggatcaacactgacaggggtgttatgctgagtgatggaaaaacaaggttctccaaaaatggccaacccatttaccacttcgttggaacctccactttcagtgaatacactgttctccatgaaggatgtgtagccaagattaaccctaatgccccacttgacaaagttgctattgtcagctgtggattctgcacaggttttggggctactgtgaatgttgcaaaaccaaagcctaataatactgttgctgtctttggcttaggagctgttggtcttgctgcctgtgaaggggcaagggtttctggtgcatctagaatcatcggggttgatttacttcccaatcgatttgaacaagccaaaaaatttggggtcactgattttgtaaacccgaaagatcacaacaaaccagtccaagaggtcattgctgaaatgactaatggaggagtagatcgtgctattgaatgcactggaagcatccaagcttcaatctcagcatttgaatgcactcatgatggttggggtactgctgtccttgttggtgtgccaaagaaggatgttgaattcaaaactaatcctatgaagttcatggaagggagaactcttaagggtaccttctatggtcactacagaccccgcactgacattcctggtgttgtggagaagtacctcaacaaggagttggaactagacaaatttatcactcactctgtgccattctcaaagatcaacactgcatttgatcttatgctgaaaggggagggcataaggtgcctcatctgcatggaagag

SEQ ID NO: 418 - protein, 371 aa, Glycine max
MRAAAVAWEAGKPLSIETIEVAPPQKGEVRLRILFNSLCRSDVYWWDAKDQTPLFPRILGHEASGIVESVGEGVTHLKPGDHALPIFTGECGECTYCKSEESNLCELLRINTDRGVMLSDGKTRFSKNGQPIYHFVGTSTFSEYTVLHEGCVAKINPNAPLDKVAIVSCGFCTGFGATVNVAKPKPNNTVAVFGLGAVGLAACEGARVSGASRIIGVDLLPNRFEQAKKFGVTDFVNPKDHNKPVQEVIAEMTNGGVDRAIECTGSIQASISAFECTHDGWGTAVLVGVPKKDVEFKTNPMKFMEGRTLKGTFYGHYRPRTDIPGVVEKYLNKELELDKFITHSVPFSKINTAFDLMLKGEGIRCLICMEE

SEQ ID NO: 419 - protein, 19 aa, Glycine max
GTFYGHYRPRTDIPGVVEK

SEQ ID NO: 420 - protein, 9 aa, Glycine max
INPNAPLDK

SEQ ID NO: 421 - DNA, 1140 bp, Glycine max
  CDS (1)..(1140)
atgtctagcaccgttggccagaccatcaagtgcaaagctgcgattgcatgggaggctgggaagccgctggtgattgaagaagtggaggttgcgccaccgcaagccggtgaagtccgtttgaagatcctctacacctctctttgccacactgatgtttacttctgggatgcgaagggccagactccattgtttcctcgcatttttggccatgaagcttcggggattgtggagagcgtaggcgagggtgtgactcatctgaaaccaggtgaccatgccctccctgtgttcacaggagagtgtggagattgcgcccattgcaagtcagaggagagcaacatgtgtgagctactcaggatcaacaccgataggggtgtcatgatccatgatggccaatcaaggttctctaagaatggacaacccatacaccatttcttgggaacctctacattcagtgaatacactgttgtccatgctggatgtgttgcaaagatcaaccctgctgctccacttgacaaagtttgtgttctcagttgtggaatttgcacaggttttggtgctactgtaaatgtagcaaaaccaaaacctggttcctctgttgccatatttggacttggagctgttggccttgcggctgctgaaggtgcaagagtttcaggtgcttcaagaatcattggagttgatttagtttctgcccgatttgaagaagctaagaagtttggggttaatgagtttgtgaacccaaaggatcatgataaacctgtgcaacaggtaattgctgaaatgaccaatggaggtgtggatcgggctgttgaatgtactggcagcatccaagccatggtctcagcattcgaatgcgtccacgatggttggggtcttgctgtacttgttggtgtgcctagtaaagatgatgcattcaaaactgctcctattaatttcctgaacgagaggactcttaagggcaccttttatggcaactacaaaccacgcaccgatcttccatctgttgtcgagaagtacatgagtggggagctagaagtggacaaattcatcactcacacagttccattctcagagatcaacaaagcttttgatttaatgctgaagggacagtccattaggtgtatcatccgcatgcaagag

SEQ ID NO: 422 - protein, 380 aa, Glycine max
MSSTVGQTIKCKAAIAWEAGKPLVIEEVEVAPPQAGEVRLKILYTSLCHTDVYFWDAKGQTPLFPRIFGHEASGIVESVGEGVTHLKPGDHALPVFTGECGDCAHCKSEESNMCELLRINTDRGVMIHDGQSRFSKNGQPIHHFLGTSTFSEYTVVHAGCVAKINPAAPLDKVCVLSCGICTGFGATVNVAKPKPGSSVAIFGLGAVGLAAAEGARVSGASRIIGVDLVSARFEEAKKFGVNEFVNPKDHDKPVQQVIAEMTNGGVDRAVECTGSIQAMVSAFECVHDGWGLAVLVGVPSKDDAFKTAPINFLNERTLKGTFYGNYKPRTDLPSVVEKYMSGELEVDKFITHTVPFSEINKAFDLMLKGQSIRCIIRMQE

SEQ ID NO: 423 - protein, 10 aa, Glycine max
FGVNEFVNPK

SEQ ID NO: 424 - protein, 13 aa, Glycine max
FITHTVPFSEINK

SEQ ID NO: 425 - protein, 19 aa, Glycine max
GTFYGNYKPRTDLPSVVEK

SEQ ID NO: 426 - protein, 9 aa, Glycine max
INPAAPLDK

SEQ ID NO: 427 - protein, 13 aa, Glycine max
TAPINFLNERTLK

SEQ ID NO: 428 - DNA, 927 bp, Glycine max
  CDS (1)..(927)
atggcgtcaagacagcaattcaaggaagacagagccgaggcagctgcaaaactcgcagcgaaagacatcggcgacatcaacagaacaaacgagcgcgacgaggggtacgacttgcacgacgaagccaacttcaagcaagcacgagctgaagcagctgcaaagctggcggccaaggatctggaggacgctaacagattaagagacaacactttcaacacatggaaagagcaacatcagcatgatgagaacaaacccggtgtgatagggtccatgtttagagccgccaaggaagccgtggttgggaagcctcaccacgaggaagtttatgcaaaggaaacaaagatgggtgaatattcagattatgcgactcagaaggcgagggaaacgaagcagaaggctggggagtatacagactatgcggctcagaaagcaaaagaaaccaaagactatgctgctgagaaggctaagaatgctaaagataccactgtgcagaaagctggagagtacaaggattataccgctgagaaggctaagaatgctaaagataccactgtgcagaaagctggagaatacaaggattataccgctgagaaggcaattgaagggaaggacagtgcagtggggaagcttggggagctaaaggaatctgctgctgatgctgctaaaagggctatgggtttcttcaccggtggcaacaaagaccaaactagagaggaggaggaggaaacgaggcggagtatgcaggaggtgagggtgcaagataaggagtatggaacgggacgtggtactggagagaagttggtgataaaaatggaagagtcgcggccaggagcggtggcggatgcgctcaaagcagcgaatagggccatggacggcgatatggaggaggaaggcgtgcttcatgtggagcgtcgtagggagaaaatg

SEQ ID NO: 429 - protein, 309 aa, Glycine max
MASRQQFKEDRAEAAAKLAAKDIGDINRTNERDEGYDLHDEANFKQARAEAAAKLAAKDLEDANRLRDNTFNTWKEQHQHDENKPGVIGSMFRAAKEAVVGKPHHEEVYAKETKMGEYSDYATQKARETKQKAGEYTDYAAQKAKETKDYAAEKAKNAKDTTVQKAGEYKDYTAEKAKNAKDTTVQKAGEYKDYTAEKAIEGKDSAVGKLGELKESAADAAKRAMGFFTGGNKDQTREEEEETRRSMQEVRVQDKEYGTGRGTGEKLVIKMEESRPGAVADALKAANRAMDGDMEEEGVLHVERRREKM

SEQ ID NO: 430 - protein, 11 aa, Glycine max
AGEYTDYAAQK

SEQ ID NO: 431 - protein, 24 aa, Glycine max
DIGDINRTNERDEGYDLHDEANFK

SEQ ID NO: 432 - protein, 17 aa, Glycine max
DLEDANRLRDNTFNTWK

SEQ ID NO: 433 - protein, 15 aa, Glycine max
EAVVGKPHHEEVYAK

SEQ ID NO: 434 - DNA, 1104 bp, Glycine max
  CDS (1)..(1104)
atgggcaaggtcaagatcggaatcaacggatttggaagaattggccgtttggtagccagagtggctctgcagagagacgatgttgaactcgttgccgttaacgaccctttcatcaccaccgattacatgacatacatgtttaaatacgacagtgttcatggacactggaagcatcacgatgtcaccgttaaggacgagaagacccttctcttcggtgacaagccagtcactatttttggacacaggtttttatttttcactttaatttttcttactgtttatgattgttgtgtcctgcatgtaaacgttgagtgttgttttctctgtgaactcagaaaccctgaagagatcccatgggggtcaactggagctgacatcattgttgagtccaccggagttttcaccgataaggacaaggccgccgcacatttgaagggtggtgcaaagaaggttattatttctgcccccagtaaggatgcccccatgtttgttgttggtgtcaacgagcacgagtacaagccagagcttgatattatttccaatgctagctgcacaaccaactgccttgccccacttgccaaggttatcaatgacaggtttggcattgttgagggtttgatgaccactgttcattccatcaccgctacccagaagactgttgatggaccatcagccaaggactggagaggtggaagagctgcttcatttaacatcattcctagcagcactggagctgccaaggctgttgggaaagtcctccctgctttgaatggaaaattgactggtatggcattccgtgttcccaccgtggatgtctctgttgttgacctcacagtgaggctggagaaagaagcttcctacgatgaaattaaaaatgctatcaaggaggaatcagagggcaagttgaagggaattcttggttacactgaagatgatgtggtctccactgactttatcggcgatagcagatcaagtatttttgatgcaaaggctggaattgcattgaataagaactttgtgaagcttgtttcttggtacgacaacgagtggggatacagctcacgtgtcattgatcttcttgtattcgttgccaagaagtctctt

SEQ ID NO: 435 - protein, 368 aa, Glycine max
MGKVKIGINGFGRIGRLVARVALQRDDVELVAVNDPFITTDYMTYMFKYDSVHGHWKHHDVTVKDEKTLLFGDKPVTIFGHRFLFFTLIFLTVYDCCVLHVNVECCFLCELRNPEEIPWGSTGADIIVESTGVFTDKDKAAAHLKGGAKKVIISAPSKDAPMFVVGVNEHEYKPELDIISNASCTTNCLAPLAKVINDRFGIVEGLMTTVHSITATQKTVDGPSAKDWRGGRAASFNIIPSSTGAAKAVGKVLPALNGKLTGMAFRVPTVDVSVVDLTVRLEKEASYDEIKNAIKEESEGKLKGILGYTEDDVVSTDFIGDSRSSIFDAKAGIALNKNFVKLVSWYDNEWGYSSRVIDLLVFVAKKSL

SEQ ID NO: 436 - protein, 8 aa, Glycine max
EASYDEIK

SEQ ID NO: 437 - protein, 27 aa, Glycine max
GILGYTEDDVVSTDFIGDSRSSIFDAK

SEQ ID NO: 438 - protein, 8 aa, Glycine max
VIISAPSK

SEQ ID NO: 439 - protein, 8 aa, Glycine max
VLPALNGK

SEQ ID NO: 440 - DNA, 1014 bp, Glycine max
  CDS (1)..(1014)
atgggcaaggtcaagatcggaatcaacggatttggaagaattggccgtttggttgccagagtcgctctgcaaagagacgatgtggagctcgttgccgttaacgaccctttcattaccaccgattacatgacatacatgtttaaatacgacagtgttcacggacactggaagcatcacgatgtcaccgttaaggacgagaagacccttctcttcggtgacaagccagtcactgtttttggacacaggaaccctgaagagatcccatgggggtcaactggagctgatatcattgttgagtccaccggagttttcaccgataaggacaaggccgccgcacatttgaagggtggtgcgaagaaggttattatttctgcccccagtaaggatgcccccatgtttgttgttggtgttaacgagcacgagtacaagccagagcttgatattatttccaatgctagctgcacaaccaactgccttgctccacttgctaaggttattaatgacaggtttggcattgttgagggtttgatgaccactgttcattccatcactgccacccagaagactgttgatgggccatcagccaaagactggagaggtggaagagctgcttcatttaacatcattcctagcagcactggagctgccaaggctgttggaaaagtccttcctgctttgaacggaaaattgactggtatggcattccgtgttcccaccgtggatgtctctgttgttgacctcacagtgaggctggagaaggaagcctcctacgatgaaattaaaaatgctatcaaggaggaatcagagggcaagttgaagggaattcttggttacactgaagatgatgtggtctccaccgactttgtgggcgatagcagatcaagtatttttgatgcaaaggctggaattgcattgaataagaactttgtgaagcttgtctcttggtatgacaacgagtggggatacagctcacgtgtcattgacctgcttgtattcgttgccaagaagtctttt

SEQ ID NO: 441 - protein, 338 aa, Glycine max
MGKVKIGINGFGRIGRLVARVALQRDDVELVAVNDPFITTDYMTYMFKYDSVHGHWKHHDVTVKDEKTLLFGDKPVTVFGHRNPEEIPWGSTGADIIVESTGVFTDKDKAAAHLKGGAKKVIISAPSKDAPMFVVGVNEHEYKPELDIISNASCTTNCLAPLAKVINDRFGIVEGLMTTVHSITATQKTVDGPSAKDWRGGRAASFNIIPSSTGAAKAVGKVLPALNGKLTGMAFRVPTVDVSVVDLTVRLEKEASYDEIKNAIKEESEGKLKGILGYTEDDVVSTDFVGDSRSSIFDAKAGIALNKNFVKLVSWYDNEWGYSSRVIDLLVFVAKKSF

SEQ ID NO: 442 - protein, 8 aa, Glycine max
EASYDEIK

SEQ ID NO: 443 - protein, 27 aa, Glycine max
GILGYTEDDVVSTDFVGDSRSSIFDAK

SEQ ID NO: 444 - protein, 8 aa, Glycine max
VIISAPSK

SEQ ID NO: 445 - protein, 8 aa, Glycine max
VLPALNGK

SEQ ID NO: 446 - DNA, 1020 bp, Glycine max
  CDS (1)..(1020)
atggcatcagataagaagattaggatcggcatcaacggatttggaaggattggccgtttggtggccagggttgcccttcaaaggaatgatgttgaacttgttgctgtcaacgatcctttcatcaccactgattacatgacatacatgttcaagtacgacaccgttcatggccagtggaagcattttgatgtgaaggtgaaggactctaagacccttctctttggtgagaagcccgtcaccgtttttggaatcaggaaccctgaggaaattccatggggtgaggttggtgctgattatgttgttgagtcaactggtgtattcactgacaaggacaaggctgctgctcacttgaagggtggtgccaagaaggttgtcatctctgccccaagcaaagatgcacccatgtttgttgttggtgttaacgagaaggagtacaagccagagcttgacattgtttccaatgctagctgcactaccaattgtcttgctcccctcgccaaggttatcaacgaccgatttggaattgtggagggtcttatgaccactgttcatgccatcacagctactcagaagactgttgatggtccatcaaacaaggactggaggggtggaagagctgcttccttcaatataattcccagcagcactggagctgctaaggctgtaggaaaagttcttccagcactgaatggtaaattgactggcatgtccttccgagtccccactgtagatgtttcagttgttgacctcactgtcaggctagagaagccagcaacctatgagcaaatcaaatctgctatcaaggaggaatcagagggcaaattgaagggtattttgggttacaccgaagatgatgttgtgtctactgattttgttggtgataacaggtctagcatatttgacgccaaggccggaatttctttgaacgacaactttgtaaaacttgtttcctggtatgacaacgaatggggttacagttcccgtgtgattgatttgattgtccacattgcatccgtggct

SEQ ID NO: 447 - protein, 340 aa, Glycine max
MASDKKIRIGINGFGRIGRLVARVALQRNDVELVAVNDPFITTDYMTYMFKYDTVHGQWKHFDVKVKDSKTLLFGEKPVTVFGIRNPEEIPWGEVGADYVVESTGVFTDKDKAAAHLKGGAKKVVISAPSKDAPMFVVGVNEKEYKPELDIVSNASCTTNCLAPLAKVINDRFGIVEGLMTTVHAITATQKTVDGPSNKDWRGGRAASFNIIPSSTGAAKAVGKVLPALNGKLTGMSFRVPTVDVSVVDLTVRLEKPATYEQIKSAIKEESEGKLKGILGYTEDDVVSTDFVGDNRSSIFDAKAGISLNDNFVKLVSWYDNEWGYSSRVIDLIVHIASVA

SEQ ID NO: 448 - protein, 11 aa, Glycine max
AGISLNDNFVK

SEQ ID NO: 449 - protein, 27 aa, Glycine max
GILGYTEDDVVSTDFVGDNRSSIFDAK

SEQ ID NO: 450 - protein, 8 aa, Glycine max
VLPALNGK

SEQ ID NO: 451 - protein, 8 aa, Glycine max
VVISAPSK

SEQ ID NO: 452 - DNA, 1050 bp, Glycine max
  CDS (1)..(1050)
atggtgacctcgtcgcaaaagattctggttaccggcggtgccggtttcataggcacccacaccgtggtccagcttctcaaaggaggcttcagtgtttcaataatcgacaatttcgataactccgtcgtggaagcagtggaccgcgtccgccaagtggtgggccctcagctttctcagaacctggaattcacccagggcgatctcaggaatagggatgacttggagaaactcttctccagaacaacttttgatgccgtgatccactttgctggcctgaaagcggttgctgaaagcgtttccaagccccgtcgctattttgattttaatttggtcggcaccatcaacctctaccaagttatggcaaagtataattgcagaaagatggttttctcatcatctgcaaccgtttatggccaacctgaaaagataccgtgtgaggaggatttcaggttacaagctatgaatccctatggacggaccaagcttttcctggaagaaattgcccgagatattcagaaagctgaaccagaatggaagatcatattactgaggtacttcaatccggttggggctcatgaaagtggtaaactcggtgaagatcccaagggcatcccaaataacctcatgccttacattcagcaagtagccgttggaagattgccggaactcaatgtatatgggcatgattatcccacaagggatggctctgcgatccgggactatatccatgtgatggacttagcagatggtcatattgctgccttgcgaaagctcttcacaacagagaacataggttgtactgcttacaacctgggaactggtcgtggaacatccgtgcttgaaatggttacagcatttgaaaaggcgtctggcaagaaaattccagtaaaattatgtccaagaagaccgggagatgctactgaggtttatgcatctacagagagagctgagaaagaacttggatggaaagcaaaatatggtgtggatgagatgtgcagggaccaatggaattgggcaaagaacaatccccagggttacacggggaagcct

SEQ ID NO: 453 - protein, 350 aa, Glycine max
MVTSSQKILVTGGAGFIGTHTVVQLLKGGFSVSIIDNFDNSVVEAVDRVRQVVGPQLSQNLEFTQGDLRNRDDLEKLFSRTTFDAVIHFAGLKAVAESVSKPRRYFDFNLVGTINLYQVMAKYNCRKMVFSSSATVYGQPEKIPCEEDFRLQAMNPYGRTKLFLEEIARDIQKAEPEWKIILLRYFNPVGAHESGKLGEDPKGIPNNLMPYIQQVAVGRLPELNVYGHDYPTRDGSAIRDYIHVMDLADGHIAALRKLFTTENIGCTAYNLGTGRGTSVLEMVTAFEKASGKKIPVKLCPRRPGDATEVYASTERAEKELGWKAKYGVDEMCRDQWNWAKNNPQGYTGKP

SEQ ID NO: 454 - protein, 12 aa, Glycine max
LFLEEIARDIQK

SEQ ID NO: 455 - DNA, 1050 bp, Glycine max
  CDS (1)..(1050)
atggtgtcttcctcccaacacattctggtcaccggtggtgccggtttcattggcacccacaccgtcgttcagcttctcaaagctggcttcagcgtttcaataatcgacaatttcgataactccgtcatggaagcagtggaccgcgtccgccaagtggttggccctctgctttctcagaacctccaattcacccagggcgatctccggaatagggatgacttggagaaactcttctccaaaacaacatttgatgccgtgatccactttgctggcttgaaagcggttgctgaaagcgttgcgaagccccgtcgctattttgattttaatttggttggcaccatcaacctctacgaatttatggcaaagtataattgcaaaaagatggttttctcatcatctgcaaccgtttatggccaacctgaaaagataccgtgtgaggaggatttcaagttacaagctatgaatccctatggacggaccaagcttttcctggaagaaattgcccgagatattcagaaagctgaaccagaatggaagatcatattactgagatacttcaatccagttggggctcatgaaagtggcaaactcggtgaagatcccaagggcatcccaaataacctcatgccttacattcagcaagtagctgttggaagattgactgaactcaatgtatacggtcatgattatccaacgagggatggctctgcgatccgggactatatccatgtgatggacttggcagatggccatattgctgccctgcgaaagctcttcacaacggagaacataggttgtactgcttacaacctgggaactggtcgtggaacatctgtgcttgaaatggttgcagcatttgaaaaggcttctggcaagaaaattccagtaaaattatgtccaagaagaccgggagatgcgactgaggtttatgcatctacagagagagctgagaaagaacttggttggaaggcaaactatggtgtggaggagatgtgcagggaccaatggaattgggcaaagaacaatccctggggttacgcggggaagcct

SEQ ID NO: 456 - protein, 350 aa, Glycine max
MVSSSQHILVTGGAGFIGTHTVVQLLKAGFSVSIIDNFDNSVMEAVDRVRQVVGPLLSQNLQFTQGDLRNRDDLEKLFSKTTFDAVIHFAGLKAVAESVAKPRRYFDFNLVGTINLYEFMAKYNCKKMVFSSSATVYGQPEKIPCEEDFKLQAMNPYGRTKLFLEEIARDIQKAEPEWKIILLRYFNPVGAHESGKLGEDPKGIPNNLMPYIQQVAVGRLTELNVYGHDYPTRDGSAIRDYIHVMDLADGHIAALRKLFTTENIGCTAYNLGTGRGTSVLEMVAAFEKASGKKIPVKLCPRRPGDATEVYASTERAEKELGWKANYGVEEMCRDQWNWAKNNPWGYAGKP

SEQ ID NO: 457 - protein, 12 aa, Glycine max
LFLEEIARDIQK

SEQ ID NO: 458 - protein, 13 aa, Glycine max
TTFDAVIHFAGLK

SEQ ID NO: 459 - DNA, 1341 bp, Glycine max
  CDS (1)..(1341)
atgggtaaggaaaagactcacatcaacattgtcgtcattggacatgtcgactctgggaagtcaactaccactggtcatttgatctacaagcttggaggtattgacaagcgtgtgattgagaggttcgagaaggaggctgctgagatgaacaagaggtcattcaagtatgcctgggtgcttgacaagctcaaggctgagcgcgaaagaggaattaccattgatattgctttgtggaagtttgaaaccaccaagtactactgcacagtcatcgatgcccccggacatcgtgactttatcaagaacatgattactggtacctcccaggctgattgtgctgtccttatcattgactccaccactggtggttttgaagctggtatttctaaggatggacagactcgtgagcatgctcttcttgctttcacccttggtgtgaagcagatgatctgctgctgtaacaagatggatgccactaccccgaagtactctaaggctaggtatgatgaaattgtgaaggaagtctcttcctacttgaagaaggttggttacaacccagacaagattccatttgtgcccatctctggtttcgagggtgacaacatgattgagaggtccaccaaccttgactggtacaagggaccaactctccttgaggctcttgaccaaatcaatgagcccaagaggccctcagacaagccactcaggcttccattgcaggatgtctacaaaattggtggtattggtaccgtgccagtgggacgtgttgagactggtgtcgtgaagcccggtatggtggtgacttttggtcccactgggctgacaactgaggttaagtctgttgagatgcaccatgaggctctcacagaggctcttccaggtgacaatgttggctttaatgtgaagaatgttgcagtcaaggatctcaagcgtggttttgttgcatccaactccaaggatgaccctgccaaggaagctgccaacttcacatctcaagtcattatcatgaaccaccctggccagattggaaatggatacgcaccggtgcttgattgccacacttctcacattgctgtcaagttttctgaaatcttgaccaagattgacaggcgatctggtaaggagcttgagaaggagcccaaatttttgaagaatggtgatgcaggtatggttaagatgattccaaccaagcccatggtggttgaaactttctctgagtatcctccccttggtcgttttgctgtgagggacatgcgtcaaactgtggctgtcggagtcatcaagagtgttgagaagaaagaccccaccggagccaaggtcaccaaggccgctgccaagaagaag

SEQ ID NO: 460 - protein, 447 aa, Glycine max
MGKEKTHINIVVIGHVDSGKSTTTGHLIYKLGGIDKRVIERFEKEAAEMNKRSFKYAWVLDKLKAERERGITIDIALWKFETTKYYCTVIDAPGHRDFIKNMITGTSQADCAVLIIDSTTGGFEAGISKDGQTREHALLAFTLGVKQMICCCNKMDATTPKYSKARYDEIVKEVSSYLKKVGYNPDKIPFVPISGFEGDNMIERSTNLDWYKGPTLLEALDQINEPKRPSDKPLRLPLQDVYKIGGIGTVPVGRVETGVVKPGMVVTFGPTGLTTEVKSVEMHHEALTEALPGDNVGFNVKNVAVKDLKRGFVASNSKDDPAKEAANFTSQVIIMNHPGQIGNGYAPVLDCHTSHIAVKFSEILTKIDRRSGKELEKEPKFLKNGDAGMVKMIPTKPMVVETFSEYPPLGRFAVRDMRQTVAVGVIKSVEKKDPTGAKVTKAAAKKK

SEQ ID NO: 461 - protein, 8 aa, Glycine max
ARYDEIVK

SEQ ID NO: 462 - protein, 17 aa, Glycine max
DGQTREHALLAFTLGVK

SEQ ID NO: 463 - protein, 7 aa, Glycine max
EVSSYLK

SEQ ID NO: 464 - protein, 7 aa, Glycine max
FSEILTK

SEQ ID NO: 465 - protein, 10 aa, Glycine max
STTTGHLIYK

SEQ ID NO: 466 - protein, 15 aa, Glycine max
THINIVVIGHVDSGK

SEQ ID NO: 467 - DNA, 1341 bp, Glycine max
  CDS (1)..(1341)
atgggtaaagagaaggttcacattaacattgtggtcattggccatgttgactctgggaagtcaaccaccactggccacttgatttacaagcttggaggtattgacaagcgtgttattgagaggtttgagaaagaagctgctgagatgaacaagaggtcattcaaatacgcctgggtgcttgacaagcttaaggctgagcgtgagagaggaattaccattgatattgcattatggaagtttgagaccaccaaatactactgcactgttattgatgctccaggacatcgtgatttcatcaagaacatgattactggaacttcccaggctgattgtgctgtccttatcattgattccacaactggtggttttgaagctggtatttccaaagatggacagactcgcgagcatgctctacttgccttcacccttggtgtcaagcaaatgatctgttgctgtaacaagatggatgccactaccccaaagtactctaaggccaggtatgaagaaattgtgaaggaagtttcttcctacttgaagaaggtaggttacaacccagacaagattccatttgttcccatctcaggttttgagggtgacaacatgattgagaggtccaccaatcttgattggtacaagggaccaacccttctcgaggctcttgaccagatcaatgagcccaagagaccctcagacaagcctttgaggcttcccttgcaggatgtctacaagattggtggtattggaacagtgccagtgggacgagttgaaactggtgtcttgaagcccggtatggtggtgacttttgctcccactggcctgacaactgaagttaagtctgtggagatgcaccatgaagctctccaggaggcccttccaggtgacaacgtaggatttaatgtgaagaatgttgcagtcaaggatctcaagcgtggttttgttgcctcaaactctaaggatgatcctgccaaggaggctgccaacttcacatcccaagtcattataatgaaccatcctggccaaattggaaatggttatgctcctgtgcttgactgccacacttctcacattgccgtcaagtttgccgaacttgtgaccaagattgacaggcgatctggtaaggagattgagaaggagcccaaattcttgaaaaatggagatgcaggttatgttaagatgattcccaccaagcctatggtggtcgaaactttctccgagtatcctcctcttggtcgttttgccgtgagggacatgcgacaaactgtggctgttggagtcatcaagagtgtggagaagaaggacccaactggagccaaggtcaccaaggctgcacagaagaagaag

SEQ ID NO: 468 - protein, 447 aa, Glycine max
MGKEKVHINIVVIGHVDSGKSTTTGHLIYKLGGIDKRVIERFEKEAAEMNKRSFKYAWVLDKLKAERERGITIDIALWKFETTKYYCTVIDAPGHRDFIKNMITGTSQADCAVLIIDSTTGGFEAGISKDGQTREHALLAFTLGVKQMICCCNKMDATTPKYSKARYEEIVKEVSSYLKKVGYNPDKIPFVPISGFEGDNMIERSTNLDWYKGPTLLEALDQINEPKRPSDKPLRLPLQDVYKIGGIGTVPVGRVETGVLKPGMVVTFAPTGLTTEVKSVEMHHEALQEALPGDNVGFNVKNVAVKDLKRGFVASNSKDDPAKEAANFTSQVIIMNHPGQIGNGYAPVLDCHTSHIAVKFAELVTKIDRRSGKEIEKEPKFLKNGDAGYVKMIPTKPMVVETFSEYPPLGRFAVRDMRQTVAVGVIKSVEKKDPTGAKVTKAAQKKK

SEQ ID NO: 469 - protein, 17 aa, Glycine max
DGQTREHALLAFTLGVK

SEQ ID NO: 470 - protein, 7 aa, Glycine max
EVSSYLK

SEQ ID NO: 471 - protein, 10 aa, Glycine max
STTTGHLIYK

SEQ ID NO: 472 - DNA, 1344 bp, Glycine max
  CDS (1)..(1344)
atgggtaaggaaaaggttcacatcagtattgtggtcattggccatgtcgactctgggaaatccactaccactggtcacctgatttacaagcttggaggcattgacaagcgtgttattgagaggtttgagaaggaagctgctgagatgaacaagaggtctttcaagtatgcctgggtgctggacaaacttaaggctgagcgtgaaagaggaatcaccattgatattgctttgtggaagtttgaaacaacaaagtattattgcacagttattgatgcgcctggacatagggatttcattaagaatatgattactgggacatcccaagctgactgtgctgttcttatcattgattcgaccactggtggttttgaagctggtatttccaaggatggacagactcgtgaacatgctctgctttcattcacccttggtgtgaaacagatgatttgctgctgtaacaaaatggatgctactacacccaagtattccaaggccaggtatgatgaaattgtgaaggaagtctcttcctacttgaagaaagtaggatacaaccctgacaagattccttttgttcctatctctggttttgagggagacaacatgattgagaggtccacaaaccttgactggtacaagggtccaactctgcttgatgcacttgaccagattagtgagcccaagaggccctctgacaagcccctcaggcttccccttcaggatgtgtacaagattggaggtattggaactgtgccagtgggacgtgttgagaccggtgtcttgaagcctggaatggtggtgacttttgcaccaactggactgacaactgaagtcaagtctgtggagatgcaccatgaatctcttacagaggcacatcctggtgacaatgtgggattcaatgttaagaatgttgctgttaaggatttgaagcgtggttatgttgcctcaaactcaaaggatgaccctgcaaaggaggctgctaacttcacagcccaagtcatcatcatgaaccaccctggtcagattggaaatggctatgcccctgtcctcgactgccacacttctcacattgctgtcaagtttgctgaactcatgaccaagattgacaggcgatccggcaaagagcttgagaaggagcccaagtttttgaagaacggtgatgctggttttgttaagatgattccaaccaaacccatggttgttgaaactttctccgagtatcctccacttggtaggtttgctgttagggacatgcgtcaaactgttgctgtgggagtcatcaagaacgttgagaagaaggatcctaccggagccaaggtcaccaaggctgcccagaagaagaagtga

SEQ ID NO: 473 - protein, 447 aa, Glycine max
MGKEKVHISIVVIGHVDSGKSTTTGHLIYKLGGIDKRVIERFEKEAAEMNKRSFKYAWVLDKLKAERERGITIDIALWKFETTKYYCTVIDAPGHRDFIKNMITGTSQADCAVLIIDSTTGGFEAGISKDGQTREHALLSFTLGVKQMICCCNKMDATTPKYSKARYDEIVKEVSSYLKKVGYNPDKIPFVPISGFEGDNMIERSTNLDWYKGPTLLDALDQISEPKRPSDKPLRLPLQDVYKIGGIGTVPVGRVETGVLKPGMVVTFAPTGLTTEVKSVEMHHESLTEAHPGDNVGFNVKNVAVKDLKRGYVASNSKDDPAKEAANFTAQVIIMNHPGQIGNGYAPVLDCHTSHIAVKFAELMTKIDRRSGKELEKEPKFLKNGDAGFVKMIPTKPMVVETFSEYPPLGRFAVRDMRQTVAVGVIKNVEKKDPTGAKVTKAAQKKK

SEQ ID NO: 474 - protein, 8 aa, Glycine max
ARYDEIVK

SEQ ID NO: 475 - protein, 17 aa, Glycine max
DGQTREHALLSFTLGVK

SEQ ID NO: 476 - protein, 7 aa, Glycine max
EVSSYLK

SEQ ID NO: 477 - protein, 10 aa, Glycine max
STTTGHLIYK

SEQ ID NO: 478 - DNA, 882 bp, Glycine max
  CDS (1)..(882)
atggcttccggtgaacagaaattccctcctcaacaacaacaaacacagcctgggaaggagcatgctatgactccagtaccccaattcactagccctgactacaagccttcaaataaacttcaagggaagattgcattagtcactgggggtgattctgggattggacgagcggtgtgtaacttgtttgccttagaaggtgctaccgtggccttcacgtatgtgaaggggcatgaggacaaggacgcgagggacacattggaaatgatcaagagagcaaagacttcggatgccaaggatccaatggcaatagcatctgatttgggttacgatgagaactgcaagagggtggttgatgaggtcgtgagtgcttatggttgtattgacattctggtcaacaatgcagctgagcagtacgagtgtggaaccgtggaggacatagacgagcctaggcttgagagggtctttcgtacaaatatcttctcctatttcttcatggcgaggcatgccttgaagcacatgaaggaaggaagcagcattatcaacacgacatcagtgaatgcatacaagggacatgcgaaactattggactacacgtccaccaagggggcaattgtggcctatacaaggggtcttgcccttcagctggtgagtaagggaattcgggttaatggggtggctccagggcccatttggacccctttgataccagcctctttcaaggaggaagaaacggcccaatttggagcgcaggtcccaatgaagagagctggtcaacctattgaggttgctccttcctatgtttttcttgcttccaaccaatgctcctcttacataactggacaagtccttcaccccaatggtggaaccgttgtgaatggttaa

SEQ ID NO: 479 - protein, 293 aa, Glycine max
MASGEQKFPPQQQQTQPGKEHAMTPVPQFTSPDYKPSNKLQGKIALVTGGDSGIGRAVCNLFALEGATVAFTYVKGHEDKDARDTLEMIKRAKTSDAKDPMAIASDLGYDENCKRVVDEVVSAYGCIDILVNNAAEQYECGTVEDIDEPRLERVFRTNIFSYFFMARHALKHMKEGSSIINTTSVNAYKGHAKLLDYTSTKGAIVAYTRGLALQLVSKGIRVNGVAPGPIWTPLIPASFKEEETAQFGAQVPMKRAGQPIEVAPSYVFLASNQCSSYITGQVLHPNGGTVVNG

SEQ ID NO: 480 - protein, 15 aa, Glycine max
EGSSIINTTSVNAYK

SEQ ID NO: 481 - protein, 12 aa, Glycine max
FPPQQQQTQPGK

SEQ ID NO: 482 - protein, 17 aa, Glycine max
GAIVAYTRGLALQLVSK

SEQ ID NO: 483 - protein, 8 aa, Glycine max
LLDYTSTK

SEQ ID NO: 484 - DNA, 882 bp, Glycine max
  CDS (1)..(882)
atggcaagcaataaggagtctaagttcccagcacagagccagaaaactcagccaggaaaagaacatgtaatgaatccactcccacaagccacaaatcctgatcacaaggccgccaataaactccagggaaaggtggcgttggtgacaggaggtgactcaggaattggcagagcggtttgcctgtgtttcgcaaaagagggtgcaaccgtggcctttacatacgtaaagggccatgaggacagggataaagatgatactctgaagatgctgcttgaagctaagacaagtggtgcagacaatccattggcaatagcagcggatattggctttgatgagaactgcaaacaggtcattgaccttgttgtcaaagaatatggccgccttgatgttctggtcaacaatgcagctgagcagcatttgacaaactctgttgaggaaatcacacaacagcagcttgagagagtcttcggaaccaacatcttttctcagttctttttggtcaagcatgctctgaagcacatgaaagaagggagctgcatcataaactctacttcagttaatgcatacaatgggaatccagaagcgttggactacactgctaccaagggagcaattgtggccttcaccagaggtctttctcagcagctagcgagtaggggaattagggtgaatggtgtggcacctggcccagtttggacgccaatacaaccagcttcaaagcctgctgagatgattcagaacttggggtgtgaggtgccaatgaaccgcgtggctcagccttgtgagattgcaccatgttatttgttcttggcaacttgtcaggactcttcctactttactggccaagtcctccatccaaatggtgggatggtcgtcaacgct

SEQ ID NO: 485 - protein, 294 aa, Glycine max
MASNKESKFPAQSQKTQPGKEHVMNPLPQATNPDHKAANKLQGKVALVTGGDSGIGRAVCLCFAKEGATVAFTYVKGHEDRDKDDTLKMLLEAKTSGADNPLAIAADIGFDENCKQVIDLVVKEYGRLDVLVNNAAEQHLTNSVEEITQQQLERVFGTNIFSQFFLVKHALKHMKEGSCIINSTSVNAYNGNPEALDYTATKGAIVAFTRGLSQQLASRGIRVNGVAPGPVWTPIQPASKPAEMIQNLGCEVPMNRVAQPCEIAPCYLFLATCQDSSYFTGQVLHPNGGMVVNA

SEQ ID NO: 486 - protein, 11 aa, Glycine max
EGATVAFTYVK

SEQ ID NO: 487 - protein, 8 aa, Glycine max
QVIDLVVK

SEQ ID NO: 488 - DNA, 879 bp, Glycine max
  CDS (1)..(879)
atggcttcgggtgaaaagaaattcccacctcaacaacaacaaacacagcctgggaaggagcatgctatgaatccagtaccccaattcactagccctgactacaagccttcaaataaacttcaaggaaagatagcattagtgactgggggtgactctgggattggacgagcggtgtgtaacttgtttgccttagaaggtgctaccgtgggcttcacatatgtgaaggggcatgaggacaaggacgcgagggacacgttggaaatgatcaagagggcaaagacttcggatgctaaagatccaatggcggtaccagctgatttgggttacgacgagaattgcaagagagtggttgatgaggtcgtgaatgcttatggttgtattgacattctggtcaacaatgcagctgagcaatacgagtgtggaacagtggaggacattgatgagcctaggcttgagagggtctttcgtacaaatatcttctcctatttcttcatgaccaggcatgccttgaagcacatgaaggaaggaagcagcattatcaacacgacatcggtgaatgcatacaagggaaatgcgaaactattggactacacgtccacgaagggagcaattgtggcctatacaaggggacttgctcttcagttggtgagtaagggaattcgggttaatggggtggctcctgggcctatttggaccccattgataccctcctctttcaaggaggaagaaacggctcaatttggtgcccaggtgccaatgaagagagctggccagcctattgaggttgctccgtcttatgtttttcttgcttgcaaccaatgctcctcttacataactggacaagtccttcaccccaatggtggaaccgttgtcaatggt

SEQ ID NO: 489 - protein, 293 aa, Glycine max
MASGEKKFPPQQQQTQPGKEHAMNPVPQFTSPDYKPSNKLQGKIALVTGGDSGIGRAVCNLFALEGATVGFTYVKGHEDKDARDTLEMIKRAKTSDAKDPMAVPADLGYDENCKRVVDEVVNAYGCIDILVNNAAEQYECGTVEDIDEPRLERVFRTNIFSYFFMTRHALKHMKEGSSIINTTSVNAYKGNAKLLDYTSTKGAIVAYTRGLALQLVSKGIRVNGVAPGPIWTPLIPSSFKEEETAQFGAQVPMKRAGQPIEVAPSYVFLACNQCSSYITGQVLHPNGGTVVNG

SEQ ID NO: 490 - protein, 15 aa, Glycine max
EGSSIINTTSVNAYK

SEQ ID NO: 491 - protein, 12 aa, Glycine max
FPPQQQQTQPGK

SEQ ID NO: 492 - protein, 17 aa, Glycine max
GAIVAYTRGLALQLVSK

SEQ ID NO: 493 - protein, 8 aa, Glycine max
LLDYTSTK

SEQ ID NO: 494 - DNA, 3207 bp, Glycine max
  CDS (1)..(3207)
atggcttctgagcaaatgcctcgcagagagaacaacagcaatagggtgatagagagagaggttcacgttgagacacacagaaaagagtccctccctgataagggaagggttgtgatagagagtgagaagaaggagaaagagagagagttggcttctgatagagccaggtctggaaatatagttaaggaggacaaagaggttgaagaaggaagaagaggaaaagaaagtggtggtggtggtggtgttcagcatgagaggaagtttgaaacgaaagttgaagagaagaagggttttggggaaaaggctgaactcgagggaataacaagagtggtggtgggaagagagtgcagcaaagaggagaaacaaggaagaacaagagagaaagtagaggcagagaaagcaagatcaatggagaaaactagagatgaagctaaaggaagagaacaagctgaaaccaaaggtcaaaccaagaagggtggtggtgaggaacagggaagaagaagagaagaaataggagaagaaaataaacaatccagcctcgaagagatttctaaatgcagagctgaagctgaagagaaagttaaggagagaaaggagagatcaaaacaagcagcaagtaatgaagctgccaaagagagaaacaagcaggcaaataaggaggcaacaaaggcaaaagatgtcacaagagagaagggtcaacaaggcaatcttaaaacaggaaatgagacacaagacattggccaaaagggttatggtggagcaaaggataccattggtagagtggacaacattactacaccacttgctaaaaaggctcaagttgctggtagcaccactgttcagtatgctggagagaaatcagcacaagccaaagatgctacggtaggatcaatggagaaaactacaaaggatgctaaaggaagagaaaaagcaggaaccaaaggtcaaacaaagaagggtggtggtgaggaacaaggaaaaagaagagaagaaacaggagaagaaaaacaatccagcctggaggagatttctaagcacagagctgaagctcaacaaaaagcaatgagttcaattgaaggtgctaaggagagatacgagagagcaaaacaagaagcaagtaaagcttccaaagagagaaacattcaagcaaataagagggctgaagaagaaagaagaaaagcagaaagtggtaggggtgttcatgtggataagtttgaagagaagaaggattcagtgctgaaagcagaactcgagagaagaacaagagaggtagagggaagagagtggaacaaagaggagaaacaaagaagttgtccaagagggaaagtagaggcagagaaagcaagaccaatggaagaaacaaaactggaagctaaaggaagagaaaaagctgaaaccaaagagggtggtggtgaggaaaaaggaatgagaagagaagaaataggagaagaaaataaacaatccagcctggaagagatttttaagtacagagctgaagctcaacagaaagttaaggagagaaacgagagagcaaaacaagcagcagaagctgccaaagagagaaacaagcaggcaaataaagggaatgaagaaggcagaagagaaagagaaagtggtgggggtgttcatcatgaggctaagtttgaaactaaaggtgaaaaaaagaaggatttagtgggaagagagcggaacaaagaggagaaacaaagaagcagtccaagaggaaaagtagaggcagagaaagcaagaccaatggaagaaacaaaggtggaagctaaaggaagagaaaaagatgtaaccaaagagggtggtgttgaggaacaaggaagaggaagaaaagaaaatgaacaatctagcttgaaagacatttccaagtacagagctgaagctcaacaaaattcattcaatgctactgaagctgctaaggaaagatacgagagggcaaaccaagcgacaagtgaagctgccaaagagagaaacaagcaggcaaataaggaggcaacaaaggcaaaagatgtcacaagagaaatggatcaacaaggcaatcttaaaacagaaaatgagacacaggacaatgaccagaagggttatggtggagcaaagtacaccattggtagtgtggaccacattactacaccatttattgtagaggccaatcttaaatcagaaaatcagatacaagacaatggccaaaagggttatggtggagcaaaggacacaattggtagtgtagaccacattactacaccacttgctgaaaaggccaaagctgctggtagcaccactgctcagtatgttggggagaaagcagcacaagccaaagatgctactgtgcaaactggcaagagtgctgcaaaagttgcctcagatttgagggacaaggctttggccacagggtggagtgctgcacattattctactgagataactgtggagggaaccaaggctgcaacaaatgttgttaagggagttgctgagtatgcaggacagaaggcttctgagcttgcagctatgtcagtggatactgcgaaaggtttagctgctgctgcagctggggagaatgccaaggagtacactgcaaggaagaaggtggaagctgagatggatttggaggccaaaagggaagctcaaaatcaggaatcgaaggagtggccatcagcaaaatccaccactgagagcattcaaagaggacaaggacaacaagaacagcatgagcaaggagaaaaatgggaacatggtgcacaaaggactaataagccacatgaaagcaacattgtggaaacctttgaggaaaacctaggtgggattggggaaaaaagggaacaaaaaccacttggaagcatcattggagagagctttcaaggagttcaagaaaaagggagtgaagtgatggcaagcattggtgaaaaactgggaagtgctgcacatacattagtgaagaagccattggataaggccactgagggagggagagaggtgttgggagctgtaggtgaaactgtggttgagattggtgaaaacatggtgaaaaaaccagcacagaaagtgcagcagcatcaaggtgaaggtggaggaggggtgctgaatgccattggtgaaaccatagcagagatagcagagacaactaaggtgattgttgctggagagggagaaaaggagataatagtaaaaacacatgaatttgaatatggagacttgaaacttgat

SEQ ID NO: 495 - protein, 1069 aa, Glycine max
MASEQMPRRENNSNRVIEREVHVETHRKESLPDKGRVVIESEKKEKERELASDRARSGNIVKEDKEVEEGRRGKESGGGGGVQHERKFETKVEEKKGFGEKAELEGITRVVVGRECSKEEKQGRTREKVEAEKARSMEKTRDEAKGREQAETKGQTKKGGGEEQGRRREEIGEENKQSSLEEISKCRAEAEEKVKERKERSKQAASNEAAKERNKQANKEATKAKDVTREKGQQGNLKTGNETQDIGQKGYGGAKDTIGRVDNITTPLAKKAQVAGSTTVQYAGEKSAQAKDATVGSMEKTTKDAKGREKAGTKGQTKKGGGEEQGKRREETGEEKQSSLEEISKHRAEAQQKAMSSIEGAKERYERAKQEASKASKERNIQANKRAEEERRKAESGRGVHVDKFEEKKDSVLKAELERRTREVEGREWNKEEKQRSCPRGKVEAEKARPMEETKLEAKGREKAETKEGGGEEKGMRREEIGEENKQSSLEEIFKYRAEAQQKVKERNERAKQAAEAAKERNKQANKGNEEGRRERESGGGVHHEAKFETKGEKKKDLVGRERNKEEKQRSSPRGKVEAEKARPMEETKVEAKGREKDVTKEGGVEEQGRGRKENEQSSLKDISKYRAEAQQNSFNATEAAKERYERANQATSEAAKERNKQANKEATKAKDVTREMDQQGNLKTENETQDNDQKGYGGAKYTIGSVDHITTPFIVEANLKSENQIQDNGQKGYGGAKDTIGSVDHITTPLAEKAKAAGSTTAQYVGEKAAQAKDATVQTGKSAAKVASDLRDKALATGWSAAHYSTEITVEGTKAATNVVKGVAEYAGQKASELAAMSVDTAKGLAAAAAGENAKEYTARKKVEAEMDLEAKREAQNQESKEWPSAKSTTESIQRGQGQQEQHEQGEKWEHGAQRTNKPHESNIVETFEENLGGIGEKREQKPLGSIIGESFQGVQEKGSEVMASIGEKLGSAAHTLVKKPLDKATEGGREVLGAVGETVVEIGENMVKKPAQKVQQHQGEGGGGVLNAIGETIAEIAETTKVIVAGEGEKEIIVKTHEFEYGDLKLD

SEQ ID NO: 496 - protein, 13 aa, Glycine max
AAGSTTAQYVGEK

SEQ ID NO: 497 - protein, 21 aa, Glycine max
ALATGWSAAHYSTEITVEGTK

SEQ ID NO: 498 - protein, 15 aa, Glycine max
AQVAGSTTVQYAGEK

SEQ ID NO: 499 - protein, 15 aa, Glycine max
DTIGRVDNITTPLAK

SEQ ID NO: 500 - protein, 16 aa, Glycine max
DTIGSVDHITTPLAEK

SEQ ID NO: 501 - protein, 16 aa, Glycine max
ERELASDRARSGNIVK

SEQ ID NO: 502 - protein, 15 aa, Glycine max
ERYERANQATSEAAK

SEQ ID NO: 503 - protein, 18 aa, Glycine max
GGGEEQGRRREEIGEENK

SEQ ID NO: 504 - protein, 12 aa, Glycine max
GLAAAAAGENAK

SEQ ID NO: 505 - protein, 9 aa, Glycine max
GRVVIESEK

SEQ ID NO: 506 - protein, 9 aa, Glycine max
GVAEYAGQK

SEQ ID NO: 507 - protein, 10 aa, Glycine max
LGSAAHTLVK

SEQ ID NO: 508 - protein, 9 aa, Glycine max
QSSLEEIFK

SEQ ID NO: 509 - protein, 9 aa, Glycine max
QSSLEEISK

SEQ ID NO: 510 - protein, 20 aa, Glycine max
REQKPLGSIIGESFQGVQEK

SEQ ID NO: 511 - protein, 11 aa, Glycine max
TGNETQDIGQK

SEQ ID NO: 512 - protein, 9 aa, Glycine max
VIVAGEGEK

SEQ ID NO: 513 - protein, 28 aa, Glycine max
VQQHQGEGGGGVLNAIGETIAEIAETTK

SEQ ID NO: 514 - DNA, 735 bp, Glycine max
  CDS (1)..(735)
atggcactgtgcaaccgcgtcagatcgggaatctctctcttcaccaaatccacgttcctcacttcccagcgatccactctccaacgatccctcgttgcccctttcatttccctcgcctccagaaattacgccaacgtgccggggcaaaaggaaaccaaagttaaggtccctctggctttgtttggaggttcaggaaactatgcctctgctttgtatattgcatctgtgaaagccaatgcagtggaaaaggttgagactgagcttctgcaatttgttgaggcagtaaagaatagtcccatattttcacagtttataagggacttgtctgtggctaaggatgttagagttaaagttatccaggatatttgtggggaagccaagttttcggatgttacaaagaacttccttgttattgttgctgagaatggaaggcttaaaaacatagacaccattgcaaagaggtttgcacagttgtcaatggcatataagggagaagtgcaagcgactgtgaccactgttgttcctcttccccctgaagaggaaaaggcattgaaggagactcttcaggaaataataggttctggagcgaaggttcatcttgaacagaagattgatccaagcatacttggtgggcttgtgcttgaatttagccagaaggtctttgacatgtcaattaagaccagggcacaacagatggagaggatcctccgagagcccgtgtccattgccaacatc

SEQ ID NO: 515 - protein, 245 aa, Glycine max
MALCNRVRSGISLFTKSTFLTSQRSTLQRSLVAPFISLASRNYANVPGQKETKVKVPLALFGGSGNYASALYIASVKANAVEKVETELLQFVEAVKNSPIFSQFIRDLSVAKDVRVKVIQDICGEAKFSDVTKNFLVIVAENGRLKNIDTIAKRFAQLSMAYKGEVQATVTTVVPLPPEEEKALKETLQEIIGSGAKVHLEQKIDPSILGGLVLEFSQKVFDMSIKTRAQQMERILREPVSIANI

SEQ ID NO: 516 - protein, 12 aa, Glycine max
ETLQEIIGSGAK

SEQ ID NO: 517 - DNA, 678 bp, Glycine max
  CDS (1)..(678)
atgaccacacaagtaccaccacacagtgtccaagtccacacaacaacacaccgctacgaagctggcgtcgtcccccccggagcccgtttcgaaccgccgcgttatgaagccggcgtcaaagcgccctccatttaccattccgagagaggtccaacgacttcccaggtcctcgccgtcctcgccggcctcccggtcggtggcatcctgctcctcctggcgggattgaccctggcaggaaccctcaccggactggcagttgccacgccgctcttcgtcctcttcagcccggtgctggttccagccacggtcgccatcggcctggccgtggccgggttcctgacgtcgggggccttcgggctcacggcgctgtcttccttctcctggatcctgaactacatccgggagacccagccagcctcggagaacctcgccgccgccgcgaagcatcacctcgccgaggcggcggagtacgtggggcagaagacgaaggaagtggggcagaagaccaaggaggttgggcaggatattcagagcaaggcacaggatacaagggaggcagctgcaagggatgcaagggaggcagctgcaagggatgcaagggaagctgctgcaagggatgcaaaggtggaggcaagggatgtaaagagaacaacagtgacagcaacaaccgcaaccgca

SEQ ID NO: 518 - protein, 226 aa, Glycine max
MTTQVPPHSVQVHTTTHRYEAGVVPPGARFEPPRYEAGVKAPSIYHSERGPTTSQVLAVLAGLPVGGILLLLAGLTLAGTLTGLAVATPLFVLFSPVLVPATVAIGLAVAGFLTSGAFGLTALSSFSWILNYIRETQPASENLAAAAKHHLAEAAEYVGQKTKEVGQKTKEVGQDIQSKAQDTREAAARDAREAAARDAREAAARDAKVEARDVKRTTVTATTATA

SEQ ID NO: 519 - protein, 9 aa, Glycine max
EVGQDIQSK

SEQ ID NO: 520 - protein, 11 aa, Glycine max
RTTVTATTATA

SEQ ID NO: 521 - DNA, 627 bp, Glycine max
  CDS (1)..(627)
atgacaaggaaacaagcaagttccacgagacgtggcggtctttcaggagtcttgcattccaaatccaaatcttctcctctactctccatatcccttgtcctatttgtagccatccttctcatcctttatgcttgtatcgggtcaggtatattgggaggaagaaaggatgtgattagcatggctgaagatgatttttcatgcacttttgaagttccaagtgcaattcctgttttgaagaatgcatatggtggcagcatgaaaaatgttttgcacgtaggccctgagagttgttcggtggtctccaaatttttaagagaaggggaaactgaagcatggggtgtggagccatatgacttagacgatgctgataggaactgcaaggctcttgtgcagaaaggcattatacgtgttgcagatataaaattccctttaccatacagggtgaagtctttttctcatgttatagtgtcagatgctttggattacctgtctccaaaatatataaacaaaactcttcctgagctagcaagggtatcttctgatggtattattattttcacaggttacccaggtcaaccgagagctaaaatagcaccattatccaaatttggccgtccacataggtgc

SEQ ID NO: 522 - protein, 209 aa, Glycine max
MTRKQASSTRRGGLSGVLHSKSKSSPLLSISLVLFVAILLILYACIGSGILGGRKDVISMAEDDFSCTFEVPSAIPVLKNAYGGSMKNVLHVGPESCSVVSKFLREGETEAWGVEPYDLDDADRNCKALVQKGIIRVADIKFPLPYRVKSFSHVIVSDALDYLSPKYINKTLPELARVSSDGIIIFTGYPGQPRAKIAPLSKFGRPHRC

SEQ ID NO: 523 - protein, 8 aa, Glycine max
NAYGGSMK

SEQ ID NO: 524 - DNA, 723 bp, Glycine max
  CDS (1)..(723)
atggccgcgcgagctctgttgaccagaaaaaccctagccaccgtgctccgcaacgacgcgaagcccataatcggagttggcataacagcagcggctactcattcacgcgggttgcacgtgtacacgctacccgatctggattacgactatggcgcactggagccagccatcagcggcgacatcatgcagctgcaccaccagaagcaccaccagacttacatcaccaactacaacaaggccctcgagcagctccaagacgccatcgccaagaaagattcctccgccgtcgttaagctccagggcgccatcaagttcaacggcggaggtcatgtcaaccattctattttctggaaaaatctagctcctgttcgtgaaggaggtggtgaaccacccaagggttcactgggatgggctattgacacacattttggttcttttgaagcattaatacaaaaagttaacgcagaaggtgctgcactacaggggtctggatgggtgtggcttggtctggacaaagagttgaagaggcttgtagttgaaaccactgccaaccaggacccactggttactaagggaccaaatttggttccattgattggtattgatgtttgggagcatgcgtactacttacagtacaagaatgttagaccagactatctgaagaacatttggaaagttattaattggaaatatgccagtgaagtgtatgagaaagagagctct

SEQ ID NO: 525 - protein, 241 aa, Glycine max
MAARALLTRKTLATVLRNDAKPIIGVGITAAATHSRGLHVYTLPDLDYDYGALEPAISGDIMQLHHQKHHQTYITNYNKALEQLQDAIAKKDSSAVVKLQGAIKFNGGGHVNHSIFWKNLAPVREGGGEPPKGSLGWAIDTHFGSFEALIQKVNAEGAALQGSGWVWLGLDKELKRLVVETTANQDPLVTKGPNLVPLIGIDVWEHAYYLQYKNVRPDYLKNIWKVINWKYASEVYEKESS

SEQ ID NO: 526 - protein, 11 aa, Glycine max
ALEQLQDAIAK

SEQ ID NO: 527 - protein, 11 aa, Glycine max
HHQTYITNYNK

SEQ ID NO: 528 - protein, 14 aa, Glycine max
NLAPVREGGGEPPK

SEQ ID NO: 529 - protein, 8 aa, Glycine max
NVRPDYLK

SEQ ID NO: 530 - protein, 16 aa, Glycine max
RLVVETTANQDPLVTK

SEQ ID NO: 531 - protein, 8 aa, Glycine max
YASEVYEK

SEQ ID NO: 532 - DNA, 720 bp, Glycine max
  CDS (1)..(720)
atggccgcgcgagccctgttgaccagaaaaaccctagccaccgttctccgcaacgacgcgaagcccataatcggagctggcatagctgcagctactcattctcgtgggttgcacgtgtacacgctccccgatctggattacgactatggcgctctggagccagccatcagcggcgaaatcatgcagctgcaccaccagaagcaccaccagacttacatcaccaacttcaacaaggccctcgagcagctccaagacgccgtcgccaagaaagattcctccgccgtcgttaagctccagggcgccatcaagttcaacggcggaggtcacgtcaaccattctattttctggaaaaatctagctcctgttcgtgaaggaggtggtgaaccacccaagggttcactgggatgggccattgacacacattttggctcttttgaagcattagtacaaaaagttaatgcagaaggtgctgcactacaggggtctggatgggtgtggcttggtctggacaaagagttgaagaggcttgtagttgaaaccactgccaaccaggacccactggttactaagggaccaaatttggttccattgcttggtattgatgtttgggagcatgcgtactacttacagtacaagaatgttagaccagactatctgaagaacatttggaaagttattaattggaaatatgccagtgaagtgtatgagaaagagagctct

SEQ ID NO: 533 - protein, 240 aa, Glycine max
MAARALLTRKTLATVLRNDAKPIIGAGIAAATHSRGLHVYTLPDLDYDYGALEPAISGEIMQLHHQKHHQTYITNFNKALEQLQDAVAKKDSSAVVKLQGAIKFNGGGHVNHSIFWKNLAPVREGGGEPPKGSLGWAIDTHFGSFEALVQKVNAEGAALQGSGWVWLGLDKELKRLVVETTANQDPLVTKGPNLVPLLGIDVWEHAYYLQYKNVRPDYLKNIWKVINWKYASEVYEKESS

SEQ ID NO: 534 - protein, 11 aa, Glycine max
ALEQLQDAVAK

SEQ ID NO: 535 - protein, 11 aa, Glycine max
HHQTYITNFNK

SEQ ID NO: 536 - protein, 14 aa, Glycine max
NLAPVREGGGEPPK

SEQ ID NO: 537 - protein, 8 aa, Glycine max
NVRPDYLK

SEQ ID NO: 538 - protein, 16 aa, Glycine max
RLVVETTANQDPLVTK

SEQ ID NO: 539 - protein, 8 aa, Glycine max
YASEVYEK

SEQ ID NO: 540 - DNA, 486 bp, Glycine max
  CDS (1)..(486)
atggctccaattgcagtgggagatgtcattccagacggcattttggcttacttggatgaagaaaacaaaccccaaactgtctctattcactctctcgccgccggcaagaaagtcatcatctttggggttcccggtgccttcactcctacatgcagcttgaagcacgtgcctggcttcattgagagagcagaagagctgaaaggaaagggtgtggacgaaataatctgtatcagcgtgaatgatccctttgtgatgaactcatgggccaaaacgttcccagagaacaagcatgttaagttccttgctgatggtgcagccaaatacaccaatgccctcggtcttgagcttgacctcaccgacaagggtctcggcgtccgctcaaagaggtttgctttgctggtggaagacctcaaggtgaaggttgcaaatgttgaaagtggaggagagttcaccatctccagtgctgaagagatcatcaaggccctc

SEQ ID NO: 541 - protein, 162 aa, Glycine max
MAPIAVGDVIPDGILAYLDEENKPQTVSIHSLAAGKKVIIFGVPGAFTPTCSLKHVPGFIERAEELKGKGVDEIICISVNDPFVMNSWAKTFPENKHVKFLADGAAKYTNALGLELDLTDKGLGVRSKRFALLVEDLKVKVANVESGGEFTISSAEEIIKAL

SEQ ID NO: 542 - protein, 13 aa, Glycine max
HVPGFIERAEELK

SEQ ID NO: 543 - protein, 10 aa, Glycine max
RFALLVEDLK

SEQ ID NO: 544 - protein, 20 aa, Glycine max
VANVESGGEFTISSAEEIIK

SEQ ID NO: 545 - protein, 14 aa, Glycine max
YTNALGLELDLTDK

SEQ ID NO: 546 - DNA, 486 bp, Glycine max
  CDS (1)..(486)
atggctccaattgcagtgggaaacgtgattccagacggcattttggcttacttggatgaagaaaacaaaccccaaactgtctccattcactctctcgccaccggcaagaaagtcatcatctttggggttcccggtgccttcactcctacttgcagcttgaagcacgttcctggcttcattgagagagcagaagagctgaaagggaagggtgtggacgaaataatctgtatcagtgtgaatgatccatttgtgatgaactcatgggccaaaacattcccagagaacaagcatgttaagttccttgctgatggtgcagccaaatacaccaatgcccttggtcttgagcttgacctcactgacaagggtctcggcgtccgctcaaagaggtttgctctgctggtggaagacctcaaggtgaaggttgcgaatgttgaaagtggaggagagttcaccatctccagtgctgaagagatcatcaaggccctt

SEQ ID NO: 547 - protein, 162 aa, Glycine max
MAPIAVGNVIPDGILAYLDEENKPQTVSIHSLATGKKVIIFGVPGAFTPTCSLKHVPGFIERAEELKGKGVDEIICISVNDPFVMNSWAKTFPENKHVKFLADGAAKYTNALGLELDLTDKGLGVRSKRFALLVEDLKVKVANVESGGEFTISSAEEIIKAL

SEQ ID NO: 548 - protein, 13 aa, Glycine max
HVPGFIERAEELK

SEQ ID NO: 549 - protein, 10 aa, Glycine max
RFALLVEDLK

SEQ ID NO: 550 - protein, 20 aa, Glycine max
VANVESGGEFTISSAEEIIK

SEQ ID NO: 551 - protein, 14 aa, Glycine max
YTNALGLELDLTDK

SEQ ID NO: 552 - DNA, 456 bp, Glycine max
  CDS (1)..(456)
atgtcgcagttgctggataaagccaagaacttcgtgtcggagaaggtaaatgatatggccaagccggaggcgagtgtcactgacgtggacttcaagcgcgtgagcaaagataatgtcgagtacttggccaaggtctctgttcgtaacccttattcaacttccatacccatttgtgagatcaactactctttcaaaagcgcatccagggagatagcatcagggaaaattccagacccaggatcgttgaaggcaaaggacacaacaatggtggatgtgccagttaaggttccatacagcatattgatgagcttggcaaaggacattggtgctgactgggacatagactatcaattggatcttggtctggttattgatgttcctgtcattggcatcttcaccattcctctctctcagaaaggagagatcaagctaccaaccctctctaccatgttcgcc

SEQ ID NO: 553 - protein, 152 aa, Glycine max
MSQLLDKAKNFVSEKVNDMAKPEASVTDVDFKRVSKDNVEYLAKVSVRNPYSTSIPICEINYSFKSASREIASGKIPDPGSLKAKDTTMVDVPVKVPYSILMSLAKDIGADWDIDYQLDLGLVIDVPVIGIFTIPLSQKGEIKLPTLSTMFA

SEQ ID NO: 554 - protein, 8 aa, Glycine max
DNVEYLAK

SEQ ID NO: 555 - DNA, 480 bp, Glycine max
  CDS (1)..(480)
atgtcggacgaagagcaccatttcgagtccaaggcagacgccggtgcctccaaaacctaccctcagcaagccggtaccattcgcaagaacggctacatcgtcatcaaaggacgcccctgcaaggttgtggaagtttcgacttccaaaactggaaagcacggtcacgccaagtgccactttgttggaattgatattttcactgccaagaaacttgaggatattgtgccctcttctcacaactgtgatgttcctcatgtgaatcgtactgattaccagctcattgatattgctgaggatggatttttgagtctgcttactgaaaatgggaacaccaaggatgacctcaagcttcccactgatgagagtctgctcactcagataaaggatggatttgctgagggcaaggatcttgttgtgtctgtcatgtctgctatgggtgaggaacagatttgcgccctgaaggatattgggccaaagaac

SEQ ID NO: 556 - protein, 160 aa, Glycine max
MSDEEHHFESKADAGASKTYPQQAGTIRKNGYIVIKGRPCKVVEVSTSKTGKHGHAKCHFVGIDIFTAKKLEDIVPSSHNCDVPHVNRTDYQLIDIAEDGFLSLLTENGNTKDDLKLPTDESLLTQIKDGFAEGKDLVVSVMSAMGEEQICALKDIGPKN

SEQ ID NO: 557 - protein, 12 aa, Glycine max
LPTDESLLTQIK

SEQ ID NO: 558 - protein, 7 aa, Glycine max
NGYIVIK

SEQ ID NO: 559 - DNA, 480 bp, Glycine max
  CDS (1)..(480)
atgtcggacgaagagcatcacttcgattctcaggcggatgcgggagcgtccaagacgtatcctcagcaggctggtaccattcgcaagaatggctacatcgtcatcaaatccaggccttgcaaggttgtagaggtctctacgtcaaagacaggcaaacatggacatgcaaagtgtcactttgctgcaattgatatttttaatgggaaaaagcttgaagatattgttccatcatcccacaactgtgatgttccacatgtgaatcgcactgactatcagcttattgatatctctgaagacggctttgtgagtctgttgactgataatggaaataccaaggatgatctgaagcttcctactgatgaggcattgcttgctcagattaaagatggattttctgaaggaaaagaccttgtggtttctgttatgtctgcaatgggagaagaacagatctgttcactgaaggacatcggtcccaaaaat

SEQ ID NO: 560 - protein, 160 aa, Glycine max
MSDEEHHFDSQADAGASKTYPQQAGTIRKNGYIVIKSRPCKVVEVSTSKTGKHGHAKCHFAAIDIFNGKKLEDIVPSSHNCDVPHVNRTDYQLIDISEDGFVSLLTDNGNTKDDLKLPTDEALLAQIKDGFSEGKDLVVSVMSAMGEEQICSLKDIGPKN

SEQ ID NO: 561 - protein, 7 aa, Glycine max
NGYIVIK

SEQ ID NO: 562 - protein, 11 aa, Glycine max
TYPQQAGTIRK

SEQ ID NO: 563 - protein, 8 aa, Glycine max
VVEVSTSK

SEQ ID NO: 564 - DNA, 501 bp, Glycine max
  CDS (1)..(501)
atggctagccaatcaaacactaaatcagttcacgatttcacagttaaagatgccaggggaaataatgttaatctcgccgattacaaaggaaaggtccttctcattgtcaatgttgcctcacaatgcggcttgactaattcaaactacacagagcttaaccaattgtatgagaaatacaaagggaaaggacttgaaattctggcattcccatgcaatcagtttggggctcaggagccaggaactaatgaagagattgtggagtttgcttgtactcgcttcaaagctgagtttcccattttcgacaaggtggatgtgaatggtgacaatgctgctccactgtacaagtttctgaaatcaagcaaaggtggactctttggggatagtatcaaatggaacttctccaaattccttgttgataaggatgggaatgtcgttgaccgttatgcacccacaacttctcctctcagcattgagaaagacataaagaagctgctagatgca

SEQ ID NO: 565 - protein, 167 aa, Glycine max
MASQSNTKSVHDFTVKDARGNNVNLADYKGKVLLIVNVASQCGLTNSNYTELNQLYEKYKGKGLEILAFPCNQFGAQEPGTNEEIVEFACTRFKAEFPIFDKVDVNGDNAAPLYKFLKSSKGGLFGDSIKWNFSKFLVDKDGNVVDRYAPTTSPLSIEKDIKKLLDA

SEQ ID NO: 566 - protein, 8 aa, Glycine max
AEFPIFDK

SEQ ID NO: 567 - protein, 13 aa, Glycine max
DARGNNVNLADYK

SEQ ID NO: 568 - protein, 19 aa, Glycine max
DGNVVDRYAPTTSPLSIEK

SEQ ID NO: 569 - protein, 9 aa, Glycine max
GGLFGDSIK

SEQ ID NO: 570 - protein, 13 aa, Glycine max
VDVNGDNAAPLYK

SEQ ID NO: 571 - DNA, 357 bp, Glycine max
  CDS (1)..(357)
atggcttccgaagaatcccagaacaagccccccagcgagcagtccactaccgaactcatcacgagcgcgaagctggtggcggaggcggcgcagtcggctctgaagagcgacagcgacaaagtggacaaggccaaggtggctgacgctgccggcgatcttctcgacgcggcggggaagtatggaaaacttgatgacaaacaaggcatagggcaatatgttgacaaggctgctgattatctgcataattaccagggtgataataccactgctccttcacagcctgcagagtctaaaggtgaagaaagtggtggtgggttaggtggtcttgcaaacttggctggaggcttcttcaaaaag

SEQ ID NO: 572 - protein, 119 aa, Glycine max
MASEESQNKPPSEQSTTELITSAKLVAEAAQSALKSDSDKVDKAKVADAAGDLLDAAGKYGKLDDKQGIGQYVDKAADYLHNYQGDNTTAPSQPAESKGEESGGGLGGLANLAGGFFKK

SEQ ID NO: 573 - protein, 23 aa, Glycine max
AADYLHNYQGDNTTAPSQPAESK

SEQ ID NO: 574 - protein, 11 aa, Glycine max
LVAEAAQSALK

SEQ ID NO: 575 - protein, 9 aa, Glycine max
QGIGQYVDK

SEQ ID NO: 576 - protein, 14 aa, Glycine max
VADAAGDLLDAAGK

SEQ ID NO: 577 - DNA, 777 bp, Glycine max
  CDS (1)..(777)
atggcggccgctccctcgcctcgcgaagagaacgtctacatggcgaagctcgccgagcaggccgagcgctacgaagagatggtggagttcatggagaaggtctccgccgccgccgacaacgaggaacttaccgtggaggagaggaacctcctctccgtcgcctacaagaacgtgatcggagcgcgccgcgcctcgtggcgcatcatctcctcgatcgagcagaaggaggagagccgcggcaacgaggatcacgtctccgtcatccgcgactaccgatccaagatcgagtccgagctctccaacatctgcgacggtatcctcaagctcctcgactctcgcctcattccatccgcttcctccggcgattccaaggtcttctacctcaagatgaagggagattaccacagataccttgccgagttcaagaccggcgccgagcgtaaggaggctgccgagagcactctctctgcatacaaagccgcacaggacattgcgaatgccgaactgcctcctactcatccaattaggcttggccttgctcttaacttttctgtattttactacgaaatccttaattctccggatcgtgcctgcaaccttgcaaaacaggcttttgatgaagctattgctgaattggatacactgggagaggagtcatacaaggatagcactttgatcatgcaactccttcgtgataacctcacactttggacctctgacatgcaggacgatggagcagatgaaattaaagaagcagcaccgaaaccggatgaccag

SEQ ID NO: 578 - protein, 259 aa, Glycine max
MAAAPSPREENVYMAKLAEQAERYEEMVEFMEKVSAAADNEELTVEERNLLSVAYKNVIGARRASWRIISSIEQKEESRGNEDHVSVIRDYRSKIESELSNICDGILKLLDSRLIPSASSGDSKVFYLKMKGDYHRYLAEFKTGAERKEAAESTLSAYKAAQDIANAELPPTHPIRLGLALNFSVFYYEILNSPDRACNLAKQAFDEAIAELDTLGEESYKDSTLIMQLLRDNLTLWTSDMQDDGADEIKEAAPKPDDQ

SEQ ID NO: 579 - protein, 11 aa, Glycine max
EAAESTLSAYK

SEQ ID NO: 580 - protein, 16 aa, Glycine max
LLDSRLIPSASSGDSK

SEQ ID NO: 581 - protein, 19 aa, Glycine max
QAFDEAIAELDTLGEESYK

SEQ ID NO: 582 - protein, 23 aa, Glycine max
VSAAADNEELTVEERNLLSVAYK

SEQ ID NO: 583 - DNA, 993 bp, Glycine max
  CDS (1)..(993)
atggcgttgaacaatggcgtccccgccaccggcaccggcctcatcgtcagcttcggtgagatgctcatcgacttcgtccccaccgtctctggcgtgtccctggccgaggcccctggcttcctcaaggcccccggcggcgcccccgctaacgtcgccatcgccgtgtcgcgcctcggcggcaaagccgccttcgtcggcaagctcggcgacgacgagttcggccacatgctcgccggaatcctcaaggaaaacggcgttcgcgccgacggcatcaactttgaccagggcgcacgcaccgccctggccttcgtgaccctacgcgccgacggggagcgtgagttcatgttctacagaaaccccagcgccgacatgctcctcaagcccgaagaactcaatctcgaactcatcagatctgcaaaagttttccattacggatcaatcagtttgatcgtggagccatgcagatcagcacacttgaaggcaatggaagtagccaaggaatctgggtgcttgctctcctatgaccccaaccttcgtctacctttgtggccttcggctgaggaagctcgtaagcaaatactgagcatttgggagaaggctgatttgatcaaggtcagtgatgcggagcttgagttcctcacaggaagtgacaagattgatgatgaatctgctttgtcattgtggcaccccaatttgaagttgctccttgtcactcttggggaacatggttccagatactacaccaagagtttcaaaggatcggtagatgctttccatgtcaatacagttgatacaactggtgccggtgattcctttgttggtgctttattggccaagattgtcgatgatcagtccatacttgaagatgaaccaaggttaagagaagtactaaagtttgcaaatgcatgtggagctattacaactacccaaaagggagcaattccggcccttcccaaagaggaggctgcactgaaactgatcaaaggggggtca

SEQ ID NO: 584 - protein, 331 aa, Glycine max
MALNNGVPATGTGLIVSFGEMLIDFVPTVSGVSLAEAPGFLKAPGGAPANVAIAVSRLGGKAAFVGKLGDDEFGHMLAGILKENGVRADGINFDQGARTALAFVTLRADGEREFMFYRNPSADMLLKPEELNLELIRSAKVFHYGSISLIVEPCRSAHLKAMEVAKESGCLLSYDPNLRLPLWPSAEEARKQILSIWEKADLIKVSDAELEFLTGSDKIDDESALSLWHPNLKLLLVTLGEHGSRYYTKSFKGSVDAFHVNTVDTTGAGDSFVGALLAKIVDDQSILEDEPRLREVLKFANACGAITTTQKGAIPALPKEEAALKLIKGGS

SEQ ID NO: 585 - protein, 19 aa, Glycine max
APGGAPANVAIAVSRLGGK

SEQ ID NO: 586 - protein, 27 aa, Glycine max
GSVDAFHVNTVDTTGAGDSFVGALLAK

SEQ ID NO: 587 - protein, 19 aa, Glycine max
IVDDQSILEDEPRLREVLK

SEQ ID NO: 588 - protein, 14 aa, Glycine max
VSDAELEFLTGSDK

SEQ ID NO: 589 - DNA, 759 bp, Glycine max
  CDS (1)..(759)
atgggcagaaagttcttcgttggtggcaactggaaatgcaatgggaccactgaggaggtgaagaagattgttactactttaaatgaagctaaagtccctggagaagatgttgtagaagttgttgtgagccctccttttgtgttccttccttttgtaaaaagtttgctgcgccctgatttccatgtctcggcccaaaattgttgggttcgcaaaggtggtgcttatactggagaggttagtgctgaaatgcttgttaatttgggaattccttgggttattattggtcactctgaacggaggcagcttttgaatgaatcaaatgagtttgtgggagataaagttgcctatgcacttcaacaaggtctgaaagttatagcatgcattggggaaactcttgaacagcgtgaagctggtacaacaacggctgttgttgctgagcaaacaaaagcaattgcagctaaaatatcaaattgggacaatgtcgttttggcctatgagccagtttgggccattggaacaggaaaggttgcaactcctgctcaggctcaagaggttcatgctgatttaaggaaatgggttcatgacaatgtgagtgctgaagttgctgcatctgtaagaattatctatggaggctctgtaaatggaggaaactgcaaagaattggcagcacagcccgatgttgatggatttttggttggtggtgcatccctcaaggcggaatttgtggacatcataaacgctgccactgtgaagaagaat

SEQ ID NO: 590 - protein, 253 aa, Glycine max
MGRKFFVGGNWKCNGTTEEVKKIVTTLNEAKVPGEDVVEVVVSPPFVFLPFVKSLLRPDFHVSAQNCWVRKGGAYTGEVSAEMLVNLGIPWVIIGHSERRQLLNESNEFVGDKVAYALQQGLKVIACIGETLEQREAGTTTAVVAEQTKAIAAKISNWDNVVLAYEPVWAIGTGKVATPAQAQEVHADLRKWVHDNVSAEVAASVRIIYGGSVNGGNCKELAAQPDVDGFLVGGASLKAEFVDIINAATVKKN

SEQ ID NO: 591 - protein, 13 aa, Glycine max
AEFVDIINAATVK

SEQ ID NO: 592 - protein, 19 aa, Glycine max
ELAAQPDVDGFLVGGASLK

SEQ ID NO: 593 - protein, 8 aa, Glycine max
FFVGGNWK

SEQ ID NO: 594 - protein, 9 aa, Glycine max
IVTTLNEAK

SEQ ID NO: 595 - protein, 16 aa, Glycine max
VATPAQAQEVHADLRK

SEQ ID NO: 596 - protein, 10 aa, Glycine max
VAYALQQGLK

SEQ ID NO: 597 - protein, 22 aa, Glycine max
VPGEDVVEVVVSPPFVFLPFVK

SEQ ID NO: 598 - DNA, 759 bp, Glycine max
  CDS (1)..(759)
atgggcagaaaattcttcgttggtggcaactggaaatgcaatgggaccactgaggaggtaaagaagattgttactactttgaatgaggctaaagtccctggagaagatgtcgtagaagttgttgtgagccctccttttgtgttccttcctgttgtaaaaagtttgctgcgccctgatttccatgtttcggcacaaaactgttgggttcgcaaaggtggtgcttataccggtgaggttagtgctgaaatgcttgttaatttgggaattccttgggttattattggtcactctgaacggaggcagcttttaaatgaatcaaatgagtttgtgggagataaagttgcctatgcacttcaacaaggtctaaaagttattgcatgcattggggagactctcgaacagcgtgaagctggtacaacaacggctgttgtttctgagcaaacaaaagcaattgcagctaaaatatcaaattgggacaatgtcgttttggcctacgagccagtttgggccattggaacaggaaaggttgctactcctgctcaggctcaagaggtccatgctgatttgaggaaatgggttcatgacaatgtgagtgctgaagttgctgcatctgtaagaattatctatggaggttctgtaaatggaggaaactgcaaagaattggccgcacagcccgatgttgatggatttttggttggtggtgcctccctgaagccggagttcgtggacatcataaatgctgccactgtgaagaagaat

SEQ ID NO: 599 - protein, 253 aa, Glycine max
MGRKFFVGGNWKCNGTTEEVKKIVTTLNEAKVPGEDVVEVVVSPPFVFLPVVKSLLRPDFHVSAQNCWVRKGGAYTGEVSAEMLVNLGIPWVIIGHSERRQLLNESNEFVGDKVAYALQQGLKVIACIGETLEQREAGTTTAVVSEQTKAIAAKISNWDNVVLAYEPVWAIGTGKVATPAQAQEVHADLRKWVHDNVSAEVAASVRIIYGGSVNGGNCKELAAQPDVDGFLVGGASLKPEFVDIINAATVKKN

SEQ ID NO: 600 - protein, 32 aa, Glycine max
ELAAQPDVDGFLVGGASLKPEFVDIINAATVK

SEQ ID NO: 601 - protein, 8 aa, Glycine max
FFVGGNWK

SEQ ID NO: 602 - protein, 9 aa, Glycine max
IVTTLNEAK

SEQ ID NO: 603 - protein, 16 aa, Glycine max
VATPAQAQEVHADLRK

SEQ ID NO: 604 - protein, 10 aa, Glycine max
VAYALQQGLK

SEQ ID NO: 605 - DNA, 765 bp, Glycine max
  CDS (1)..(765)
atggcctcattgggtgggttacaaaatgtgagcggcatcaattttcttatcaaagagaaaggatgttgtatgctgcagggtccaaaagtcaatgcaaagttcgagctgaagccgccaccatatccactgaatggtttggagccggtgatgagccagcagacacttgagtttcactgggggaagcaccacaagacttatgtggaaaatctgaaaaaacaagttgttgggacagagcttgatgggaagtcactagaagagattattgtcacatcatacaataagggtgacattcttccagctttcaacaatgcagcacaggtatggaaccatgacttcttctgggagtgcatgaaaccaggtggaggtggaaagccatccggggagcttctagaactgattgaaagagactttggttcatttgtaaaattccttgatgagttcaaggctgctgctgcaacacaatttggttcagggtgggcttggctagcatatagagcaagaaaatttgatggggaaaatgtagcaaatcctccttcacccgatgaggacaacaagctagtggtgctcaagagtcccaatgctgtgaacccccttgtttggggaggttactacccacttcttaccattgatgtttgggagcatgcttactaccttgattttcagaaccggcgtcctgattatatatcagtgttcatggataagcttgtttcctgggatgcagtgagctctagacttgaacaagctaaggctttaattaccagtgca

SEQ ID NO: 606 - protein, 255 aa, Glycine max
MASLGGLQNVSGINFLIKEKGCCMLQGPKVNAKFELKPPPYPLNGLEPVMSQQTLEFHWGKHHKTYVENLKKQVVGTELDGKSLEEIIVTSYNKGDILPAFNNAAQVWNHDFFWECMKPGGGGKPSGELLELIERDFGSFVKFLDEFKAAAATQFGSGWAWLAYRARKFDGENVANPPSPDEDNKLVVLKSPNAVNPLVWGGYYPLLTIDVWEHAYYLDFQNRRPDYISVFMDKLVSWDAVSSRLEQAKALITSA

SEQ ID NO: 607 - protein, 17 aa, Glycine max
FDGENVANPPSPDEDNK

SEQ ID NO: 608 - protein, 15 aa, Glycine max
LVSWDAVSSRLEQAK

SEQ ID NO: 609 - protein, 10 aa, Glycine max
QVVGTELDGK

SEQ ID NO: 610 - protein, 12 aa, Glycine max
SLEEIIVTSYNK

SEQ ID NO: 611 - protein, 7 aa, Glycine max
TYVENLK

SEQ ID NO: 612 - DNA, 732 bp, Glycine max
  CDS (1)..(732)
atggcctcattgggtgggttacaaaatctaagcggcatcaattttcttatcaaaaaagagggtccaaaagtcaatgcgaagttcgagctgaagccgccaccatatccactgaatggtttggagccggtgatgagccagcagacacttgagtttcattgggggaaacaccacaagacatatgtggaaaatctgaaaaaacaaattgttgggacagagcttgatgggaaatcactagaagagattatagtgacatcatataataagggtgacattcttccagctttcaacaatgcagcacaggtatggaaccatgacttcttctgggagtgcatgaaaccaggtggaggtggaaagccatccggggagcttctagaactgattgaaagagactttggctcatttgaaaaattccttgatgagtttaaggctgctgctgcaacacaatttggttcaggatgggcttggcttgcatatagagcaagcaaatttgatggggaaaatgcagcaaatcctccttcaccagatgaggacaacaagctagtggtgctcaagagtcccaatgctgtgaacccccttgtttggggaggctattatccacttcttaccattgatgtttgggagcatgcttacaaccttgattttcagaaccggcgccctgattatatatcagtgttcatggataagcttgtttcctgggatgcagtgagttctagacttgaacaagcaaggctt

SEQ ID NO: 613 - protein, 244 aa, Glycine max
MASLGGLQNLSGINFLIKKEGPKVNAKFELKPPPYPLNGLEPVMSQQTLEFHWGKHHKTYVENLKKQIVGTELDGKSLEEIIVTSYNKGDILPAFNNAAQVWNHDFFWECMKPGGGGKPSGELLELIERDFGSFEKFLDEFKAAAATQFGSGWAWLAYRASKFDGENAANPPSPDEDNKLVVLKSPNAVNPLVWGGYYPLLTIDVWEHAYNLDFQNRRPDYISVFMDKLVSWDAVSSRLEQARL

SEQ ID NO: 614 - protein, 10 aa, Glycine max
QIVGTELDGK

SEQ ID NO: 615 - protein, 12 aa, Glycine max
SLEEIIVTSYNK

SEQ ID NO: 616 - protein, 7 aa, Glycine max
TYVENLK

SEQ ID NO: 617 - DNA, 1419 bp, Glycine max
  CDS (1)..(1419)
atggcttctaaggtggtttcggttttggttatagcgatgatgttgtttgccatgaactgtaactgcactagtgttggccacatgccttcaaccaaagaggaaggtcacgattttcaggagtctaaagccaagaccacacaaactgcgaacaaggccatggaaactggtaaagagggacaagaagccgcagagtcatggacagaatgggctaaagagaaactcagtgaaggtcttggcttcaaacatgatcaggaatccaaagaatccaccactaacaaagtctctgattatgccactgacactgcacagaaatccaaggattatgcaactgacactgctcagaaatcaaaggactatgcaggtgatgctgctcagaaatcaaaggactacgcaggtgatgctgctcagaaaaccaaagactatgccagtgacactgcacagacatcaaaggactatgctggtgatgctgctcagaaatcaaagggctatgttggtgatgctgcacaaaagaccaaagaatatgttggtgatgcagcacagaagacaaaggattatgccactgacgcagcacagaagaccaaagattatgctactcagaagaccaaggactatgcaagtgatgcaactgatgctgcaaagaagactaaagattatgctgctcagaagactaaggactatgcaagtgaagctagtgatgttgcacagaacacaaaagattatgctgctcagaagaccaaggactatgccagcggtggtgcgcagaagaccaaggattatgccagcggtggtgcgcagaagaccaaggactatgcaagtgatgctgcgcagaagaccaaggactatgcaagtgatggtgctcaaaagagcaaagaatatgcgggtgatgtagcactgaatgccaaagattatgctcaaaaaagcaaagattacgcaggtgatgctgcacagaatgtcaaagattatgcaagtgatgcagtgcagaagagaaaagagtattctggtgatgcttctcacaagagcaaagaggcttctgattatgccagtgagacggctaagaagaccaaagattatgtcggtgatgctgctcagagaagcaaaggggctgctgaatatgctagtgatgcggctcagaggaccaaagagtatgctggtgatgctaccaagagaagcaaagaggcttctaatgatcatgccaatgacatggctcagaagaccaaagactacgccagtgacactgctcagagaaccaaggaaaaactccaagacattgcatctgaagctggtcaatacagtgcagagaaagctagagaaatgaaggatgcagcagcagagaaggcaagtgacatagcaaaggctgcaaagcaaaaatcacaagaggtgaaagagaaattaggtggacaacaccgggatgccgagctt

SEQ ID NO: 618 - protein, 473 aa, Glycine max
MASKVVSVLVIAMMLFAMNCNCTSVGHMPSTKEEGHDFQESKAKTTQTANKAMETGKEGQEAAESWTEWAKEKLSEGLGFKHDQESKESTTNKVSDYATDTAQKSKDYATDTAQKSKDYAGDAAQKSKDYAGDAAQKTKDYASDTAQTSKDYAGDAAQKSKGYVGDAAQKTKEYVGDAAQKTKDYATDAAQKTKDYATQKTKDYASDATDAAKKTKDYAAQKTKDYASEASDVAQNTKDYAAQKTKDYASGGAQKTKDYASGGAQKTKDYASDAAQKTKDYASDGAQKSKEYAGDVALNAKDYAQKSKDYAGDAAQNVKDYASDAVQKRKEYSGDASHKSKEASDYASETAKKTKDYVGDAAQRSKGAAEYASDAAQRTKEYAGDATKRSKEASNDHANDMAQKTKDYASDTAQRTKEKLQDIASEAGQYSAEKAREMKDAAAEKASDIAKAAKQKSQEVKEKLGGQHRDAEL

SEQ ID NO: 619 - protein, 11 aa, Glycine max
DYAGDAAQNVK

SEQ ID NO: 620 - protein, 9 aa, Glycine max
DYASDAAQK

SEQ ID NO: 621 - protein, 11 aa, Glycine max
DYASDATDAAK

SEQ ID NO: 622 - protein, 9 aa, Glycine max
DYASDAVQK

SEQ ID NO: 623 - protein, 11 aa, Glycine max
DYASDTAQRTK

SEQ ID NO: 624 - protein, 11 aa, Glycine max
DYASDTAQTSK

SEQ ID NO: 625 - protein, 14 aa, Glycine max
DYASEASDVAQNTK

SEQ ID NO: 626 - protein, 9 aa, Glycine max
DYATDAAQK

SEQ ID NO: 627 - protein, 11 aa, Glycine max
DYVGDAAQRSK

SEQ ID NO: 628 - protein, 11 aa, Glycine max
EASDYASETAK

SEQ ID NO: 629 - protein, 11 aa, Glycine max
EYAGDVALNAK

SEQ ID NO: 630 - protein, 9 aa, Glycine max
EYVGDAAQK

SEQ ID NO: 631 - protein, 14 aa, Glycine max
GAAEYASDAAQRTK

SEQ ID NO: 632 - protein, 9 aa, Glycine max
GYVGDAAQK

SEQ ID NO: 633 - protein, 15 aa, Glycine max
LQDIASEAGQYSAEK

SEQ ID NO: 634 - protein, 8 aa, Glycine max
LSEGLGFK

SEQ ID NO: 635 - protein, 11 aa, Glycine max
VSDYATDTAQK

SEQ ID NO: 636 - DNA, 1374 bp, Glycine max
  CDS (1)..(1374)
atggcttcgagggtggtttcggttttggtgatagcgatgatgttgtttgccatgaactgtaactgcactagtgttggccacatgccttcaaccaaagaggaaggtcacgattttcaggaggctaaagccaagacaacacaaactgcgaacaaggccatggaaactggtaaagatgggaaagaagccgcagagtcatggacagaatgggctaaagagaaactcactgaaggtcttggcttcaaacatgatcaagaatccaccactaagaaagtctctgactatgccggtgatgctgctcagaaatcaaaggactatgccggtgacactgctcagaaaaccaaggactatgccggtgacactgctcagaaaaccaaggactatgccggtgacactgcacagacatcaaaggactatgccggtgatgctgctcagaaatcaaagggctatgtcggtgatgctgcacaaaagaccaaagaatatgttggtgatgctgctcagaagaccatggattatgccactgatgcagcacagaagaccaaagattatgctactcagaagactaaggactatgcaagtgatgcaactgatgctgcaaaaaagactaaagattatgctgctcagaagaccaaggattatgcaagtgatgcaactgatgctgcaaaaaagactaaggattatgctgcgcagaagaccaaggactatgccagtggtggtgcgcagaagaccaaggactatgccagtggtgctgcgcagaagaccaaggactatgcaagtgatgctgcgcagaggaccaaggaccatgcaagtgatggtgctcaaaagagcaaagaatatgcgggtgatgtagcacagaatgccaaagattatgctcaaaagagcaaagattatgcgggtgatgctgtacagaatatcaaagattatgcaaatgatgcagcgcacaagagcaaagattatgctggtgatgcttctcacaagagcaaagaagcttctgattatgccagtgagacggctcagaagaccaaagactatgttggtgatgctgctcagaaaagcaaagaggcttctgaatatgctagtgatgcggctcagaggaccaaagagtatgctggtgatgccaccaagagaagcaaagaggcttctgatcatgccaatgacatggctcggaagaccaaagactacgccagtgacactgctcagagaaccaaggaaaaactccaagacattgcatctgaggctggtcaatacagtacagagaaggccagagaaatgaaggatgcagcagcagagaaggctagtgacattgcaaaggctgcaaagcaaaaatcacaagagctgaaagacaaattaggtggacaacaccgggatgctgagctt

SEQ ID NO: 637 - protein, 458 aa, Glycine max
MASRVVSVLVIAMMLFAMNCNCTSVGHMPSTKEEGHDFQEAKAKTTQTANKAMETGKDGKEAAESWTEWAKEKLTEGLGFKHDQESTTKKVSDYAGDAAQKSKDYAGDTAQKTKDYAGDTAQKTKDYAGDTAQTSKDYAGDAAQKSKGYVGDAAQKTKEYVGDAAQKTMDYATDAAQKTKDYATQKTKDYASDATDAAKKTKDYAAQKTKDYASDATDAAKKTKDYAAQKTKDYASGGAQKTKDYASGAAQKTKDYASDAAQRTKDHASDGAQKSKEYAGDVAQNAKDYAQKSKDYAGDAVQNIKDYANDAAHKSKDYAGDASHKSKEASDYASETAQKTKDYVGDAAQKSKEASEYASDAAQRTKEYAGDATKRSKEASDHANDMARKTKDYASDTAQRTKEKLQDIASEAGQYSTEKAREMKDAAAEKASDIAKAAKQKSQELKDKLGGQHRDAEL

SEQ ID NO: 638 - protein, 11 aa, Glycine max
DYAGDAVQNIK

SEQ ID NO: 639 - protein, 11 aa, Glycine max
DYASDAAQRTK

SEQ ID NO: 640 - protein, 11 aa, Glycine max
DYASDATDAAK

SEQ ID NO: 641 - protein, 11 aa, Glycine max
DYASDTAQRTK

SEQ ID NO: 642 - protein, 9 aa, Glycine max
DYVGDAAQK

SEQ ID NO: 643 - protein, 12 aa, Glycine max
EASDYASETAQK

SEQ ID NO: 644 - protein, 14 aa, Glycine max
EASEYASDAAQRTK

SEQ ID NO: 645 - protein, 11 aa, Glycine max
EYAGDVAQNAK

SEQ ID NO: 646 - protein, 9 aa, Glycine max
GYVGDAAQK

SEQ ID NO: 647 - protein, 15 aa, Glycine max
LQDIASEAGQYSTEK

SEQ ID NO: 648 - protein, 8 aa, Glycine max
LTEGLGFK

SEQ ID NO: 649 - protein, 11 aa, Glycine max
VSDYAGDAAQK

1. A kit for diagnosing an allergy to a soybean, the kit comprising, as an antigen, at least one of proteins defined below in any of the following (1) to (8):
(1) (1A) Bowman-Birk type proteinase inhibitor D-II or a variant thereof, which is defined below in any of (1A-a) to (1A-e):
(1A-a) a protein comprising an amino acid sequence with deletion, substitution, insertion or addition of one or several amino acids in SEQ ID NO: 2;
(1A-b) a protein comprising an amino acid sequence having at least 70% identity to the amino acid sequence of SEQ ID NO: 2;
(1A-c) a protein comprising an amino acid sequence encoded by a nucleotide sequence with deletion, substitution, insertion or addition of one or several nucleotides in SEQ ID NO: 1;
(1A-d) a protein comprising an amino acid sequence encoded by a nucleotide sequence having at least 70% identity to the nucleotide sequence of SEQ ID NO: 1; or
(1A-e) a protein comprising an amino acid sequence encoded by a nucleic acid that hybridizes under stringent conditions with a nucleic acid having a nucleotide sequence complementary to the nucleotide sequence of SEQ ID NO: 1; or
(1B) a protein comprising at least one amino acid sequence selected from the group consisting of SEQ ID NOs: 17-20;
(2) (2A) Ribulose bisphosphate carboxylase large chain or a variant thereof, which is defined below in any of (2A-a) to (2A-e):
(2A-a) a protein comprising an amino acid sequence with deletion, substitution, insertion or addition of one or several amino acids in SEQ ID NO: 4;
(2A-b) a protein comprising an amino acid sequence having at least 70% identity to the amino acid sequence of SEQ ID NO: 4;
(2A-c) a protein comprising an amino acid sequence encoded by a nucleotide sequence with deletion, substitution, insertion or addition of one or several nucleotides in SEQ ID NO: 3;
(2A-d) a protein comprising an amino acid sequence encoded by a nucleotide sequence having at least 70% identity to the nucleotide sequence of SEQ ID NO: 3; or
(2A-e) a protein comprising an amino acid sequence encoded by a nucleic acid that hybridizes under stringent conditions with a nucleic acid having a nucleotide sequence complementary to the nucleotide sequence of SEQ ID NO: 3; or
(2B) a protein comprising at least one amino acid sequence selected from the group consisting of SEQ ID NOs: 21-28;
(3) (3A) Gamma-glutamyl hydrolase or a variant thereof, which is defined below in any of (3A-a) to (3A-e):
(3A-a) a protein comprising an amino acid sequence with deletion, substitution, insertion or addition of one or several amino acids in SEQ ID NO: 6;
(3A-b) a protein comprising an amino acid sequence having at least 70% identity to the amino acid sequence of SEQ ID NO: 6;
(3A-c) a protein comprising an amino acid sequence encoded by a nucleotide sequence with deletion, substitution, insertion or addition of one or several nucleotides in SEQ ID NO: 5;
(3A-d) a protein comprising an amino acid sequence encoded by a nucleotide sequence having at least 70% identity to the nucleotide sequence of SEQ ID NO: 5; or
(3A-e) a protein comprising an amino acid sequence encoded by a nucleic acid that hybridizes under stringent conditions with a nucleic acid having a nucleotide sequence complementary to the nucleotide sequence of SEQ ID NO: 5; or
(3B) a protein comprising an amino acid sequence of SEQ ID NO: 29 or 30;
(4) (4A) Guanine nucleotide-binding protein subunit beta-like protein or a variant thereof, which is defined below in any of (4A-a) to (4A-e):
(4A-a) a protein comprising an amino acid sequence with deletion, substitution, insertion or addition of one or several amino acids in SEQ ID NO: 8;
(4A-b) a protein comprising an amino acid sequence having at least 70% identity to the amino acid sequence of SEQ ID NO: 8;
(4A-c) a protein comprising an amino acid sequence encoded by a nucleotide sequence with deletion, substitution, insertion or addition of one or several nucleotides in SEQ ID NO: 7;
(4A-d) a protein comprising an amino acid sequence encoded by a nucleotide sequence having at least 70% identity to the nucleotide sequence of SEQ ID NO: 7; or
(4A-e) a protein comprising an amino acid sequence encoded by a nucleic acid that hybridizes under stringent conditions with a nucleic acid having a nucleotide sequence complementary to the nucleotide sequence of SEQ ID NO: 7; or
(4B) a protein comprising an amino acid sequence of SEQ ID NO: 31 or 32;
(5) (5A) Protein SLE3 or a variant thereof, which is defined below in any of (5A-a) to (5A-e):
(5A-a) a protein comprising an amino acid sequence with deletion, substitution, insertion or addition of one or several amino acids in SEQ ID NO: 10;
(5A-b) a protein comprising an amino acid sequence having at least 70% identity to the amino acid sequence of SEQ ID NO: 10;
(5A-c) a protein comprising an amino acid sequence encoded by a nucleotide sequence with deletion, substitution, insertion or addition of one or several nucleotides in SEQ ID NO: 9;
(5A-d) a protein comprising an amino acid sequence encoded by a nucleotide sequence having at least 70% identity to the nucleotide sequence of SEQ ID NO: 9; or
(5A-e) a protein comprising an amino acid sequence encoded by a nucleic acid that hybridizes under stringent conditions with a nucleic acid having a nucleotide sequence complementary to the nucleotide sequence of SEQ ID NO: 9; or
(5B) a protein comprising an amino acid sequence of SEQ ID NO: 33 or 34;
(6) (6A) Seed biotin-containing protein SBP65 or a variant thereof, which is defined below in any of (6A-a) to (6A-e):
(6A-a) a protein comprising an amino acid sequence with deletion, substitution, insertion or addition of one or several amino acids in SEQ ID NO: 12;
(6A-b) a protein comprising an amino acid sequence having at least 70% identity to the amino acid sequence of SEQ ID NO: 12;
(6A-c) a protein comprising an amino acid sequence encoded by a nucleotide sequence with deletion, substitution, insertion or addition of one or several nucleotides in SEQ ID NO: 11;
(6A-d) a protein comprising an amino acid sequence encoded by a nucleotide sequence having at least 70% identity to the nucleotide sequence of SEQ ID NO: 11; or
(6A-e) a protein comprising an amino acid sequence encoded by a nucleic acid that hybridizes under stringent conditions with a nucleic acid having a nucleotide sequence complementary to the nucleotide sequence of SEQ ID NO: 11; or
(6B) a protein comprising at least one amino acid sequence selected from the group consisting of SEQ ID NOs: 35-53;
(7) (7A) Ferritin-2 or a variant thereof, which is defined below in any of (7A-a) to (7A-e):
(7A-a) a protein comprising an amino acid sequence with deletion, substitution, insertion or addition of one or several amino acids in SEQ ID NO: 14;
(7A-b) a protein comprising an amino acid sequence having at least 70% identity to the amino acid sequence of SEQ ID NO: 14;
(7A-c) a protein comprising an amino acid sequence encoded by a nucleotide sequence with deletion, substitution, insertion or addition of one or several nucleotides in SEQ ID NO: 13;
(7A-d) a protein comprising an amino acid sequence encoded by a nucleotide sequence having at least 70% identity to the nucleotide sequence of SEQ ID NO: 13; or
(7A-e) a protein comprising an amino acid sequence encoded by a nucleic acid that hybridizes under stringent conditions with a nucleic acid having a nucleotide sequence complementary to the nucleotide sequence of SEQ ID NO: 13; or
(7B) a protein comprising at least one amino acid sequence selected from the group consisting of SEQ ID NOs: 54-61;
(8) (8A) Cell division cycle protein 48 homolog or a variant thereof, which is defined below in any of (8A-a) to (8A-e):
(8A-a) a protein comprising an amino acid sequence with deletion, substitution, insertion or addition of one or several amino acids in SEQ ID NO: 16;
(8A-b) a protein comprising an amino acid sequence having at least 70% identity to the amino acid sequence of SEQ ID NO: 16;
(8A-c) a protein comprising an amino acid sequence encoded by a nucleotide sequence with deletion, substitution, insertion or addition of one or several nucleotides in SEQ ID NO: 15;
(8A-d) a protein comprising an amino acid sequence encoded by a nucleotide sequence having at least 70% identity to the nucleotide sequence of SEQ ID NO: 15; or
(8A-e) a protein comprising an amino acid sequence encoded by a nucleic acid that hybridizes under stringent conditions with a nucleic acid having a nucleotide sequence complementary to the nucleotide sequence of SEQ ID NO: 15; or
(8B) a protein comprising at least one amino acid sequence selected from the group consisting of SEQ ID NOs: 62-68.

2. A kit for diagnosing an allergy to a soybean, the kit comprising, as an antigen, at least one of proteins defined below in any one of (1α) to (55α):
(1α) (1αA1) endoplasmin homolog isoform X2 or a variant thereof, which is defined below in any of (1αA1-a) to (1αA1-e):
(1αA1-a) a protein comprising an amino acid sequence with deletion, substitution, insertion or addition of one or several amino acids in SEQ ID NO: 70;
(1αA1-b) a protein comprising an amino acid sequence having at least 70% identity to the amino acid sequence of SEQ ID NO: 70;
(1αA1-c) a protein comprising an amino acid sequence encoded by a nucleotide sequence with deletion, substitution, insertion or addition of one or several nucleotides in SEQ ID NO: 69;
(1αA1-d) a protein comprising an amino acid sequence encoded by a nucleotide sequence having at least 70% identity to the nucleotide sequence of SEQ ID NO: 69; or
(1αA1-e) a protein comprising an amino acid sequence encoded by a nucleic acid that hybridizes under stringent conditions with a nucleic acid having a nucleotide sequence complementary to the nucleotide sequence of SEQ ID NO: 69;
(1αB1) a protein comprising at least one amino acid sequence selected from the group consisting of SEQ ID NOs: 71-87,
(1αA2) endoplasmin homolog isoform X2 or a variant thereof, which is defined below in any of (1αA2-a) to (1αA2-e):
(1αA2-a) a protein comprising an amino acid sequence with deletion, substitution, insertion or addition of one or several amino acids in SEQ ID NO: 89;
(1αA2-b) a protein comprising an amino acid sequence having at least 70% identity to the amino acid sequence of SEQ ID NO: 89;
(1αA2-c) a protein comprising an amino acid sequence encoded by a nucleotide sequence with deletion, substitution, insertion or addition of one or several nucleotides in SEQ ID NO: 88;
(1αA2-d) a protein comprising an amino acid sequence encoded by a nucleotide sequence having at least 70% identity to the nucleotide sequence of SEQ ID NO: 88; or
(1αA2-e) a protein comprising an amino acid sequence encoded by a nucleic acid that hybridizes under stringent conditions with a nucleic acid having a nucleotide sequence complementary to the nucleotide sequence of SEQ ID NO: 88; or
(1αB2) a protein comprising at least one amino acid sequence selected from the group consisting of SEQ ID NOs: 90-104;
(2α) (2αA1) heat shock cognate protein 80 or a variant thereof, which is defined below in any of (2αA1-a) to (2αA1-e):
(2αA1-a) a protein comprising an amino acid sequence with deletion, substitution, insertion or addition of one or several amino acids in SEQ ID NO: 106;
(2αA1-b) a protein comprising an amino acid sequence having at least 70% identity to the amino acid sequence of SEQ ID NO: 106;
(2αA1-c) a protein comprising an amino acid sequence encoded by a nucleotide sequence with deletion, substitution, insertion or addition of one or several nucleotides in SEQ ID NO: 105;
(2αA1-d) a protein comprising an amino acid sequence encoded by a nucleotide sequence having at least 70% identity to the nucleotide sequence of SEQ ID NO: 105; or
(2αA1-e) a protein comprising an amino acid sequence encoded by a nucleic acid that hybridizes under stringent conditions with a nucleic acid having a nucleotide sequence complementary to the nucleotide sequence of SEQ ID NO: 105; or
(2αB1) a protein comprising at least one amino acid sequence selected from the group consisting of SEQ ID NOs: 107-120;
(2αA2) heat shock protein 90-1 or a variant thereof, which is defined below in any of (2αA2-a) to (2αA2-e):
(2αA2-a) a protein comprising an amino acid sequence with deletion, substitution, insertion or addition of one or several amino acids in SEQ ID NO: 122;
(2αA2-b) a protein comprising an amino acid sequence having at least 70% identity to the amino acid sequence of SEQ ID NO: 122;
(2αA2-c) a protein comprising an amino acid sequence encoded by a nucleotide sequence with deletion, substitution, insertion or addition of one or several nucleotides in SEQ ID NO: 121;
(2αA2-d) a protein comprising an amino acid sequence encoded by a nucleotide sequence having at least 70% identity to the nucleotide sequence of SEQ ID NO: 121; or
(2αA2-e) a protein comprising an amino acid sequence encoded by a nucleic acid that hybridizes under stringent conditions with a nucleic acid having a nucleotide sequence complementary to the nucleotide sequence of SEQ ID NO: 121;
(2αB2) a protein comprising at least one amino acid sequence selected from the group consisting of SEQ ID NOs: 123-137;
(2αA3) hypothetical protein GLYMA_02 G302500 or a variant thereof, which is defined below in any of (2αA3-a) to (2αA3-e):
(2αA3-a) a protein comprising an amino acid sequence with deletion, substitution, insertion or addition of one or several amino acids in SEQ ID NO: 139;
(2αA3-b) a protein comprising an amino acid sequence having at least 70% identity to the amino acid sequence of SEQ ID NO: 139;
(2αA3-c) a protein comprising an amino acid sequence encoded by a nucleotide sequence with deletion, substitution, insertion or addition of one or several nucleotides in SEQ ID NO: 138;
(2αA3-d) a protein comprising an amino acid sequence encoded by a nucleotide sequence having at least 70% identity to the nucleotide sequence of SEQ ID NO: 138; or
(2αA3-e) a protein comprising an amino acid sequence encoded by a nucleic acid that hybridizes under stringent conditions with a nucleic acid having a nucleotide sequence complementary to the nucleotide sequence of SEQ ID NO: 138; or
(2αB3) a protein comprising at least one amino acid sequence selected from the group consisting of SEQ ID NOs: 140-153;
(4α) (4αA) embryo-specific urease isoform X1 or a variant thereof, which is defined below in any of (4αA-a) to (4αA-e):
(4αA-a) a protein comprising an amino acid sequence with deletion, substitution, insertion or addition of one or several amino acids in SEQ ID NO: 155;
(4αA-b) a protein comprising an amino acid sequence having at least 70% identity to the amino acid sequence of SEQ ID NO: 155;
(4αA-c) a protein comprising an amino acid sequence encoded by a nucleotide sequence with deletion, substitution, insertion or addition of one or several nucleotides in SEQ ID NO: 154;
(4αA-d) a protein comprising an amino acid sequence encoded by a nucleotide sequence having at least 70% identity to the nucleotide sequence of SEQ ID NO: 154; or
(4αA-e) a protein comprising an amino acid sequence encoded by a nucleic acid that hybridizes under stringent conditions with a nucleic acid having a nucleotide sequence complementary to the nucleotide sequence of SEQ ID NO: 154; or
(4αB) a protein comprising at least one amino acid sequence selected from the group consisting of SEQ ID NOs: 156-157;
(5α) (5αA) alpha-1,4 glucan phosphorylase L isozyme, chloroplastic/amyloplastic or a variant thereof, which is defined below in any of (5αA-a) to (5αA-e):
(5αA-a) a protein comprising an amino acid sequence with deletion, substitution, insertion or addition of one or several amino acids in SEQ ID NO: 159;
(5αA-b) a protein comprising an amino acid sequence having at least 70% identity to the amino acid sequence of SEQ ID NO: 159;
(5αA-c) a protein comprising an amino acid sequence encoded by a nucleotide sequence with deletion, substitution, insertion or addition of one or several nucleotides in SEQ ID NO: 158;
(5αA-d) a protein comprising an amino acid sequence encoded by a nucleotide sequence having at least 70% identity to the nucleotide sequence of SEQ ID NO: 158; or
(5αA-e) a protein comprising an amino acid sequence encoded by a nucleic acid that hybridizes under stringent conditions with a nucleic acid having a nucleotide sequence complementary to the nucleotide sequence of SEQ ID NO: 158; or
(5αB) a protein comprising at least one amino acid sequence selected from the group consisting of SEQ ID NOs: 160-161;
(6α) (6αA1) aconitate hydratase 1 or a variant thereof, which is defined below in any of (6αA1-a) to (6αA1-e):
(6αA1-a) a protein comprising an amino acid sequence with deletion, substitution, insertion or addition of one or several amino acids in SEQ ID NO: 163;
(6αA1-b) a protein comprising an amino acid sequence having at least 70% identity to the amino acid sequence of SEQ ID NO: 163;
(6αA1-c) a protein comprising an amino acid sequence encoded by a nucleotide sequence with deletion, substitution, insertion or addition of one or several nucleotides in SEQ ID NO: 162;
(6αA1-d) a protein comprising an amino acid sequence encoded by a nucleotide sequence having at least 70% identity to the nucleotide sequence of SEQ ID NO: 162; or
(6αA1-e) a protein comprising an amino acid sequence encoded by a nucleic acid that hybridizes under stringent conditions with a nucleic acid having a nucleotide sequence complementary to the nucleotide sequence of SEQ ID NO: 162;
(6αB1) a protein comprising at least one amino acid sequence selected from the group consisting of SEQ ID NOs: 164-167; or
(6αA2) aconitate hydratase 1 or a variant thereof, which is defined below in any of (6αA2-a) to (6αA2-e):
(6αA2-a) a protein comprising an amino acid sequence with deletion, substitution, insertion or addition of one or several amino acids in SEQ ID NO: 169;
(6αA2-b) a protein comprising an amino acid sequence having at least 70% identity to the amino acid sequence of SEQ ID NO: 169;
(6αA2-c) a protein comprising an amino acid sequence encoded by a nucleotide sequence with deletion, substitution, insertion or addition of one or several nucleotides in SEQ ID NO: 168;
(6αA2-d) a protein comprising an amino acid sequence encoded by a nucleotide sequence having at least 70% identity to the nucleotide sequence of SEQ ID NO: 168; or
(6αA2-e) a protein comprising an amino acid sequence encoded by a nucleic acid that hybridizes under stringent conditions with a nucleic acid having a nucleotide sequence complementary to the nucleotide sequence of SEQ ID NO: 168; or
(6αB2) a protein comprising at least one amino acid sequence selected from the group consisting of SEQ ID NOs: 170-172;
(7α) (7αA) methionine synthase or a variant thereof, which is defined below in any of (7αA-a) to (7αA-e):
(7αA-a) a protein comprising an amino acid sequence with deletion, substitution, insertion or addition of one or several amino acids in SEQ ID NO: 174;
(7αA-b) a protein comprising an amino acid sequence having at least 70% identity to the amino acid sequence of SEQ ID NO: 174;
(7αA-c) a protein comprising an amino acid sequence encoded by a nucleotide sequence with deletion, substitution, insertion or addition of one or several nucleotides in SEQ ID NO: 173;
(7αA-d) a protein comprising an amino acid sequence encoded by a nucleotide sequence having at least 70% identity to the nucleotide sequence of SEQ ID NO: 173; or
(7αA-e) a protein comprising an amino acid sequence encoded by a nucleic acid that hybridizes under stringent conditions with a nucleic acid having a nucleotide sequence complementary to the nucleotide sequence of SEQ ID NO: 173; or
(7αB) a protein comprising at least one amino acid sequence selected from the group consisting of SEQ ID NOs: 175-187;
(8α) (8αA) transketolase, chloroplastic or a variant thereof, which is defined below in any of (8αA-a) to (8αA-e):
(8αA-a) a protein comprising an amino acid sequence with deletion, substitution, insertion or addition of one or several amino acids in SEQ ID NO: 189;
(8αA-b) a protein comprising an amino acid sequence having at least 70% identity to the amino acid sequence of SEQ ID NO: 189;
(8αA-c) a protein comprising an amino acid sequence encoded by a nucleotide sequence with deletion, substitution, insertion or addition of one or several nucleotides in SEQ ID NO: 188;
(8αA-d) a protein comprising an amino acid sequence encoded by a nucleotide sequence having at least 70% identity to the nucleotide sequence of SEQ ID NO: 188; or
(8αA-e) a protein comprising an amino acid sequence encoded by a nucleic acid that hybridizes under stringent conditions with a nucleic acid having a nucleotide sequence complementary to the nucleotide sequence of SEQ ID NO: 188; or
(8αB) a protein comprising at least one amino acid sequence selected from the group consisting of SEQ ID NOs: 190-199;
(9α) (9αA) lysine-tRNA ligase, cytoplasmic-like isoform X2 or a variant thereof, which is defined below in any of (9αA-a) to (9αA-e):
(9αA-a) a protein comprising an amino acid sequence with deletion, substitution, insertion or addition of one or several amino acids in SEQ ID NO: 201;
(9αA-b) a protein comprising an amino acid sequence having at least 70% identity to the amino acid sequence of SEQ ID NO: 201;
(9αA-c) a protein comprising an amino acid sequence encoded by a nucleotide sequence with deletion, substitution, insertion or addition of one or several nucleotides in SEQ ID NO: 200;
(9αA-d) a protein comprising an amino acid sequence encoded by a nucleotide sequence having at least 70% identity to the nucleotide sequence of SEQ ID NO: 200; or
(9αA-e) a protein comprising an amino acid sequence encoded by a nucleic acid that hybridizes under stringent conditions with a nucleic acid having a nucleotide sequence complementary to the nucleotide sequence of SEQ ID NO: 200; or
(9αB) a protein comprising an amino acid sequence of SEQ ID NO: 202;
(10α) (10αA1) chaperonin CPN60-2, mitochondrial or a variant thereof, which is defined below in any of (10αA1-a) to (10αA1-e):
(10αA1-a) a protein comprising an amino acid sequence with deletion, substitution, insertion or addition of one or several amino acids in SEQ ID NO: 204;
(10αA1-b) a protein comprising an amino acid sequence having at least 70% identity to the amino acid sequence of SEQ ID NO: 204;
(10αA1-c) a protein comprising an amino acid sequence encoded by a nucleotide sequence with deletion, substitution, insertion or addition of one or several nucleotides in SEQ ID NO: 203;
(10αA1-d) a protein comprising an amino acid sequence encoded by a nucleotide sequence having at least 70% identity to the nucleotide sequence of SEQ ID NO: 203; or
(10αA1-e) a protein comprising an amino acid sequence encoded by a nucleic acid that hybridizes under stringent conditions with a nucleic acid having a nucleotide sequence complementary to the nucleotide sequence of SEQ ID NO: 203;
(10αB1) a protein comprising at least one amino acid sequence selected from the group consisting of SEQ ID NOs: 205-218;
(10αA2) chaperonin CPN60-2, mitochondrial-like isoform X1 or a variant thereof, which is defined below in any of (10αA2-a) to (10αA2-e):
(10αA2-a) a protein comprising an amino acid sequence with deletion, substitution, insertion or addition of one or several amino acids in SEQ ID NO: 220;
(10αA2-b) a protein comprising an amino acid sequence having at least 70% identity to the amino acid sequence of SEQ ID NO: 220;
(10αA2-c) a protein comprising an amino acid sequence encoded by a nucleotide sequence with deletion, substitution, insertion or addition of one or several nucleotides in SEQ ID NO: 219;
(10αA2-d) a protein comprising an amino acid sequence encoded by a nucleotide sequence having at least 70% identity to the nucleotide sequence of SEQ ID NO: 219; or
(10αA2-e) a protein comprising an amino acid sequence encoded by a nucleic acid that hybridizes under stringent conditions with a nucleic acid having a nucleotide sequence complementary to the nucleotide sequence of SEQ ID NO: 219; or
(10αB2) a protein comprising at least one amino acid sequence selected from the group consisting of SEQ ID NOs: 221-231;
(11α) (11αA) polyadenylate-binding protein 8 isoform X3 or a variant thereof, which is defined below in any of (11αA-a) to (11αA-e):
(11αA-a) a protein comprising an amino acid sequence with deletion, substitution, insertion or addition of one or several amino acids in SEQ ID NO: 233;
(11αA-b) a protein comprising an amino acid sequence having at least 70% identity to the amino acid sequence of SEQ ID NO: 233;
(11αA-c) a protein comprising an amino acid sequence encoded by a nucleotide sequence with deletion, substitution, insertion or addition of one or several nucleotides in SEQ ID NO: 232;
(11αA-d) a protein comprising an amino acid sequence encoded by a nucleotide sequence having at least 70% identity to the nucleotide sequence of SEQ ID NO: 232; or
(11αA-e) a protein comprising an amino acid sequence encoded by a nucleic acid that hybridizes under stringent conditions with a nucleic acid having a nucleotide sequence complementary to the nucleotide sequence of SEQ ID NO: 232; or
(11αB) a protein comprising at least one amino acid sequence selected from the group consisting of SEQ ID NOs: 234-237;
(12α) (12αA) pyrophosphate-fructose 6-phosphate 1-phosphotransferase subunit alpha-like or a variant thereof, which is defined below in any of (12αA-a) to (12αA-e):
(12αA-a) a protein comprising an amino acid sequence with deletion, substitution, insertion or addition of one or several amino acids in SEQ ID NO: 239;
(12αA-b) a protein comprising an amino acid sequence having at least 70% identity to the amino acid sequence of SEQ ID NO: 239;
(12αA-c) a protein comprising an amino acid sequence encoded by a nucleotide sequence with deletion, substitution, insertion or addition of one or several nucleotides in SEQ ID NO: 238;
(12αA-d) a protein comprising an amino acid sequence encoded by a nucleotide sequence having at least 70% identity to the nucleotide sequence of SEQ ID NO: 238; or
(12αA-e) a protein comprising an amino acid sequence encoded by a nucleic acid that hybridizes under stringent conditions with a nucleic acid having a nucleotide sequence complementary to the nucleotide sequence of SEQ ID NO: 238; or
(12αB) a protein comprising an amino acid sequence of SEQ ID NO: 240;
(13α) (13αA1) protein disulfide isomerase-like protein precursor or a variant thereof, which is defined below in any of (13αA1-a) to (13αA1-e):
(13αA1-a) a protein comprising an amino acid sequence with deletion, substitution, insertion or addition of one or several amino acids in SEQ ID NO: 242;
(13αA1-b) a protein comprising an amino acid sequence having at least 70% identity to the amino acid sequence of SEQ ID NO: 242;
(13αA1-c) a protein comprising an amino acid sequence encoded by a nucleotide sequence with deletion, substitution, insertion or addition of one or several nucleotides in SEQ ID NO: 241;
(13αA1-d) a protein comprising an amino acid sequence encoded by a nucleotide sequence having at least 70% identity to the nucleotide sequence of SEQ ID NO: 241; or
(13αA1-e) a protein comprising an amino acid sequence encoded by a nucleic acid that hybridizes under stringent conditions with a nucleic acid having a nucleotide sequence complementary to the nucleotide sequence of SEQ ID NO: 241;
(13αB1) a protein comprising at least one amino acid sequence selected from the group consisting of SEQ ID NOs: 243-252;
(13αA2) protein disulfide-isomerase or a variant thereof, which is defined below in any of (13αA2-a) to (13αA2-e):
(13αA2-a) a protein comprising an amino acid sequence with deletion, substitution, insertion or addition of one or several amino acids in SEQ ID NO: 254;
(13αA2-b) a protein comprising an amino acid sequence having at least 70% identity to the amino acid sequence of SEQ ID NO: 254;
(13αA2-c) a protein comprising an amino acid sequence encoded by a nucleotide sequence with deletion, substitution, insertion or addition of one or several nucleotides in SEQ ID NO: 253;
(13αA2-d) a protein comprising an amino acid sequence encoded by a nucleotide sequence having at least 70% identity to the nucleotide sequence of SEQ ID NO: 253; or
(13αA2-e) a protein comprising an amino acid sequence encoded by a nucleic acid that hybridizes under stringent conditions with a nucleic acid having a nucleotide sequence complementary to the nucleotide sequence of SEQ ID NO: 253; or
(13αB2) a protein comprising at least one amino acid sequence selected from the group consisting of SEQ ID NOs: 255-278;
(14α) (14αA1) V-type proton ATPase subunit B 2 or a variant thereof, which is defined below in any of (14αA1-a) to (14αA1-e):
(14αA1-a) a protein comprising an amino acid sequence with deletion, substitution, insertion or addition of one or several amino acids in SEQ ID NO: 280;
(14αA1-b) a protein comprising an amino acid sequence having at least 70% identity to the amino acid sequence of SEQ ID NO: 280;
(14αA1-c) a protein comprising an amino acid sequence encoded by a nucleotide sequence with deletion, substitution, insertion or addition of one or several nucleotides in SEQ ID NO: 279;
(14αA1-d) a protein comprising an amino acid sequence encoded by a nucleotide sequence having at least 70% identity to the nucleotide sequence of SEQ ID NO: 279; or
(14αA1-e) a protein comprising an amino acid sequence encoded by a nucleic acid that hybridizes under stringent conditions with a nucleic acid having a nucleotide sequence complementary to the nucleotide sequence of SEQ ID NO: 279;
(14αB1) a protein comprising at least one amino acid sequence selected from the group consisting of SEQ ID NOs: 281-284;
(14αA2) V-type proton ATPase subunit B 2 or a variant thereof, which is defined below in any of (14αA2-a) to (14αA2-e):
(14αA2-a) a protein comprising an amino acid sequence with deletion, substitution, insertion or addition of one or several amino acids in SEQ ID NO: 286;
(14αA2-b) a protein comprising an amino acid sequence having at least 70% identity to the amino acid sequence of SEQ ID NO: 286;
(14αA2-c) a protein comprising an amino acid sequence encoded by a nucleotide sequence with deletion, substitution, insertion or addition of one or several nucleotides in SEQ ID NO: 285;
(14αA2-d) a protein comprising an amino acid sequence encoded by a nucleotide sequence having at least 70% identity to the nucleotide sequence of SEQ ID NO: 285; or
(14αA2-e) a protein comprising an amino acid sequence encoded by a nucleic acid that hybridizes under stringent conditions with a nucleic acid having a nucleotide sequence complementary to the nucleotide sequence of SEQ ID NO: 285; or
(14αB2) a protein comprising at least one amino acid sequence selected from the group consisting of SEQ ID NOs: 287-289;
(15, 16α) (15, 16αA1) UTP-glucose-1-phosphate uridylyltransferase or a variant thereof, which is defined below in any of (15, 16αA1-a) to (15, 16αA1-e):
(15, 16αA1-a) a protein comprising an amino acid sequence with deletion, substitution, insertion or addition of one or several amino acids in SEQ ID NO: 291;
(15, 16αA1-b) a protein comprising an amino acid sequence having at least 70% identity to the amino acid sequence of SEQ ID NO: 291;
(15, 16αA1-c) a protein comprising an amino acid sequence encoded by a nucleotide sequence with deletion, substitution, insertion or addition of one or several nucleotides in SEQ ID NO: 290;
(15, 16αA1-d) a protein comprising an amino acid sequence encoded by a nucleotide sequence having at least 70% identity to the nucleotide sequence of SEQ ID NO: 290; or
(15, 16αA1-e) a protein comprising an amino acid sequence encoded by a nucleic acid that hybridizes under stringent conditions with a nucleic acid having a nucleotide sequence complementary to the nucleotide sequence of SEQ ID NO: 290;
(15, 16αB1) a protein comprising at least one amino acid sequence selected from the group consisting of SEQ ID NOs: 292-304;
(15, 16αA2) hypothetical protein GLYMA_02 G241100 or a variant thereof, which is defined below in any of (15, 16αA2-a) to (15, 16αA2-e):
(15, 16αA2-a) a protein comprising an amino acid sequence with deletion, substitution, insertion or addition of one or several amino acids in SEQ ID NO: 306;
(15, 16αA2-b) a protein comprising an amino acid sequence having at least 70% identity to the amino acid sequence of SEQ ID NO: 306;
(15, 16αA2-c) a protein comprising an amino acid sequence encoded by a nucleotide sequence with deletion, substitution, insertion or addition of one or several nucleotides in SEQ ID NO: 305;
(15, 16αA2-d) a protein comprising an amino acid sequence encoded by a nucleotide sequence having at least 70% identity to the nucleotide sequence of SEQ ID NO: 305; or
(15, 16αA2-e) a protein comprising an amino acid sequence encoded by a nucleic acid that hybridizes under stringent conditions with a nucleic acid having a nucleotide sequence complementary to the nucleotide sequence of SEQ ID NO: 305; or
(15, 16αB2) a protein comprising at least one amino acid sequence selected from the group consisting of SEQ ID NOs: 307-318;
(17α) (17αA1) guanosine nucleotide diphosphate dissociation inhibitor 2 or a variant thereof, which is defined below in any of (17αA1-a) to (17αA1-e):
(17αA1-a) a protein comprising an amino acid sequence with deletion, substitution, insertion or addition of one or several amino acids in SEQ ID NO: 320;
(17αA1-b) a protein comprising an amino acid sequence having at least 70% identity to the amino acid sequence of SEQ ID NO: 320;
(17αA1-c) a protein comprising an amino acid sequence encoded by a nucleotide sequence with deletion, substitution, insertion or addition of one or several nucleotides in SEQ ID NO: 319;
(17αA1-d) a protein comprising an amino acid sequence encoded by a nucleotide sequence having at least 70% identity to the nucleotide sequence of SEQ ID NO: 319; or
(17αA1-e) a protein comprising an amino acid sequence encoded by a nucleic acid that hybridizes under stringent conditions with a nucleic acid having a nucleotide sequence complementary to the nucleotide sequence of SEQ ID NO: 319;
(17αB1) a protein comprising at least one amino acid sequence selected from the group consisting of SEQ ID NOs: 321-325;
(17αA2) rab GDP dissociation inhibitor alpha-like or a variant thereof, which is defined below in any of (17αA2-a) to (17αA2-e):
(17αA2-a) a protein comprising an amino acid sequence with deletion, substitution, insertion or addition of one or several amino acids in SEQ ID NO: 327;
(17αA2-b) a protein comprising an amino acid sequence having at least 70% identity to the amino acid sequence of SEQ ID NO: 327;
(17αA2-c) a protein comprising an amino acid sequence encoded by a nucleotide sequence with deletion, substitution, insertion or addition of one or several nucleotides in SEQ ID NO: 326;
(17αA2-d) a protein comprising an amino acid sequence encoded by a nucleotide sequence having at least 70% identity to the nucleotide sequence of SEQ ID NO: 326; or
(17αA2-e) a protein comprising an amino acid sequence encoded by a nucleic acid that hybridizes under stringent conditions with a nucleic acid having a nucleotide sequence complementary to the nucleotide sequence of SEQ ID NO: 326; or
(17αB2) a protein comprising at least one amino acid sequence selected from the group consisting of SEQ ID NOs: 328-332;
(18α) (18αA) hypothetical protein GLYMA_10G028300 or a variant thereof, which is defined below in any of (18αA-a) to (18αA-e):
(18αA-a) a protein comprising an amino acid sequence with deletion, substitution, insertion or addition of one or several amino acids in SEQ ID NO: 334;
(18αA-b) a protein comprising an amino acid sequence having at least 70% identity to the amino acid sequence of SEQ ID NO: 334;
(18αA-c) a protein comprising an amino acid sequence encoded by a nucleotide sequence with deletion, substitution, insertion or addition of one or several nucleotides in SEQ ID NO: 333;
(18αA-d) a protein comprising an amino acid sequence encoded by a nucleotide sequence having at least 70% identity to the nucleotide sequence of SEQ ID NO: 333; or
(18αA-e) a protein comprising an amino acid sequence encoded by a nucleic acid that hybridizes under stringent conditions with a nucleic acid having a nucleotide sequence complementary to the nucleotide sequence of SEQ ID NO: 333; or
(18αB) a protein comprising at least one amino acid sequence selected from the group consisting of SEQ ID NOs: 335-339;
(19α) (19αA) sucrose binding protein homolog S-64 or a variant thereof, which is defined below in any of (19αA-a) to (19αA-e):
(19αA-a) a protein comprising an amino acid sequence with deletion, substitution, insertion or addition of one or several amino acids in SEQ ID NO: 341;
(19αA-b) a protein comprising an amino acid sequence having at least 70% identity to the amino acid sequence of SEQ ID NO: 341;
(19αA-c) a protein comprising an amino acid sequence encoded by a nucleotide sequence with deletion, substitution, insertion or addition of one or several nucleotides in SEQ ID NO: 340;
(19αA-d) a protein comprising an amino acid sequence encoded by a nucleotide sequence having at least 70% identity to the nucleotide sequence of SEQ ID NO: 340; or
(19αA-e) a protein comprising an amino acid sequence encoded by a nucleic acid that hybridizes under stringent conditions with a nucleic acid having a nucleotide sequence complementary to the nucleotide sequence of SEQ ID NO: 340; or
(19αB) a protein comprising at least one amino acid sequence selected from the group consisting of SEQ ID NOs: 342-346;
(25α) (25αA1) succinyl-CoA ligase [ADP-forming] subunit beta, mitochondrial or a variant thereof, which is defined below in any of (25αA1-a) to (25αA1-e):
(25αA1-a) a protein comprising an amino acid sequence with deletion, substitution, insertion or addition of one or several amino acids in SEQ ID NO: 348;
(25αA1-b) a protein comprising an amino acid sequence having at least 70% identity to the amino acid sequence of SEQ ID NO: 348;
(25αA1-c) a protein comprising an amino acid sequence encoded by a nucleotide sequence with deletion, substitution, insertion or addition of one or several nucleotides in SEQ ID NO: 347;
(25αA1-d) a protein comprising an amino acid sequence encoded by a nucleotide sequence having at least 70% identity to the nucleotide sequence of SEQ ID NO: 347; or
(25αA1-e) a protein comprising an amino acid sequence encoded by a nucleic acid that hybridizes under stringent conditions with a nucleic acid having a nucleotide sequence complementary to the nucleotide sequence of SEQ ID NO: 347;
(25αB1) a protein comprising at least one amino acid sequence selected from the group consisting of SEQ ID NOs: 349-356;
(25αA2) succinyl-CoA ligase [ADP-forming] subunit beta, mitochondrial or a variant thereof, which is defined below in any of (25αA2-a) to (25αA2-e):
(25αA2-a) a protein comprising an amino acid sequence with deletion, substitution, insertion or addition of one or several amino acids in SEQ ID NO: 358;
(25αA2-b) a protein comprising an amino acid sequence having at least 70% identity to the amino acid sequence of SEQ ID NO: 358;
(25αA2-c) a protein comprising an amino acid sequence encoded by a nucleotide sequence with deletion, substitution, insertion or addition of one or several nucleotides in SEQ ID NO: 357;
(25αA2-d) a protein comprising an amino acid sequence encoded by a nucleotide sequence having at least 70% identity to the nucleotide sequence of SEQ ID NO: 357; or
(25αA2-e) a protein comprising an amino acid sequence encoded by a nucleic acid that hybridizes under stringent conditions with a nucleic acid having a nucleotide sequence complementary to the nucleotide sequence of SEQ ID NO: 357; or
(25αB2) a protein comprising at least one amino acid sequence selected from the group consisting of SEQ ID NOs: 359-365;
(26α) (26αA1) phosphoglycerate kinase, cytosolic or a variant thereof, which is defined below in any of (26αA1-a) to (26αA1-e):
(26αA1-a) a protein comprising an amino acid sequence with deletion, substitution, insertion or addition of one or several amino acids in SEQ ID NO: 367;
(26αA1-b) a protein comprising an amino acid sequence having at least 70% identity to the amino acid sequence of SEQ ID NO: 367;
(26αA1-c) a protein comprising an amino acid sequence encoded by a nucleotide sequence with deletion, substitution, insertion or addition of one or several nucleotides in SEQ ID NO: 366;
(26αA1-d) a protein comprising an amino acid sequence encoded by a nucleotide sequence having at least 70% identity to the nucleotide sequence of SEQ ID NO: 366; or
(26αA1-e) a protein comprising an amino acid sequence encoded by a nucleic acid that hybridizes under stringent conditions with a nucleic acid having a nucleotide sequence complementary to the nucleotide sequence of SEQ ID NO: 366;
(26αB1) a protein comprising at least one amino acid sequence selected from the group consisting of SEQ ID NOs: 368-382;
(26αA2) phosphoglycerate kinase, cytosolic or a variant thereof, which is defined below in any of (26αA2-a) to (26αA2-e):
(26αA2-a) a protein comprising an amino acid sequence with deletion, substitution, insertion or addition of one or several amino acids in SEQ ID NO: 384;
(26αA2-b) a protein comprising an amino acid sequence having at least 70% identity to the amino acid sequence of SEQ ID NO: 384;
(26αA2-c) a protein comprising an amino acid sequence encoded by a nucleotide sequence with deletion, substitution, insertion or addition of one or several nucleotides in SEQ ID NO: 383;
(26αA2-d) a protein comprising an amino acid sequence encoded by a nucleotide sequence having at least 70% identity to the nucleotide sequence of SEQ ID NO: 383; or
(26αA2-e) a protein comprising an amino acid sequence encoded by a nucleic acid that hybridizes under stringent conditions with a nucleic acid having a nucleotide sequence complementary to the nucleotide sequence of SEQ ID NO: 383;
(26αB2) a protein comprising at least one amino acid sequence selected from the group consisting of SEQ ID NOs: 385-392;
(26αA3) phosphoglycerate kinase, cytosolic or a variant thereof, which is defined below in any of (26αA3-a) to (26αA3-e):
(26αA3-a) a protein comprising an amino acid sequence with deletion, substitution, insertion or addition of one or several amino acids in SEQ ID NO: 394;
(26αA3-b) a protein comprising an amino acid sequence having at least 70% identity to the amino acid sequence of SEQ ID NO: 394;
(26αA3-c) a protein comprising an amino acid sequence encoded by a nucleotide sequence with deletion, substitution, insertion or addition of one or several nucleotides in SEQ ID NO: 393;
(26αA3-d) a protein comprising an amino acid sequence encoded by a nucleotide sequence having at least 70% identity to the nucleotide sequence of SEQ ID NO: 393; or
(26αA3-e) a protein comprising an amino acid sequence encoded by a nucleic acid that hybridizes under stringent conditions with a nucleic acid having a nucleotide sequence complementary to the nucleotide sequence of SEQ ID NO: 393; or
(26αB3) a protein comprising at least one amino acid sequence selected from the group consisting of SEQ ID NOs: 395-409;
(27α) (27αA1) alcohol dehydrogenase 1 or a variant thereof, which is defined below in any of (27αA1-a) to (27αA1-e):
(27αA1-a) a protein comprising an amino acid sequence with deletion, substitution, insertion or addition of one or several amino acids in SEQ ID NO: 411;
(27αA1-b) a protein comprising an amino acid sequence having at least 70% identity to the amino acid sequence of SEQ ID NO: 411;
(27αA1-c) a protein comprising an amino acid sequence encoded by a nucleotide sequence with deletion, substitution, insertion or addition of one or several nucleotides in SEQ ID NO: 410;
(27αA1-d) a protein comprising an amino acid sequence encoded by a nucleotide sequence having at least 70% identity to the nucleotide sequence of SEQ ID NO: 410; or
(27αA1-e) a protein comprising an amino acid sequence encoded by a nucleic acid that hybridizes under stringent conditions with a nucleic acid having a nucleotide sequence complementary to the nucleotide sequence of SEQ ID NO: 410;
(27αB1) a protein comprising at least one amino acid sequence selected from the group consisting of SEQ ID NOs: 412-416;
(27αA2) alcohol dehydrogenase 1 or a variant thereof, which is defined below in any of (27αA2-a) to (27αA2-e):
(27αA2-a) a protein comprising an amino acid sequence with deletion, substitution, insertion or addition of one or several amino acids in SEQ ID NO: 418;
(27αA2-b) a protein comprising an amino acid sequence having at least 70% identity to the amino acid sequence of SEQ ID NO: 418;
(27αA2-c) a protein comprising an amino acid sequence encoded by a nucleotide sequence with deletion, substitution, insertion or addition of one or several nucleotides in SEQ ID NO: 417;
(27αA2-d) a protein comprising an amino acid sequence encoded by a nucleotide sequence having at least 70% identity to the nucleotide sequence of SEQ ID NO: 417; or
(27αA2-e) a protein comprising an amino acid sequence encoded by a nucleic acid that hybridizes under stringent conditions with a nucleic acid having a nucleotide sequence complementary to the nucleotide sequence of SEQ ID NO: 417;
(27αB2) a protein comprising at least one amino acid sequence selected from the group consisting of SEQ ID NOs: 419-420;
(27αA3) alcohol dehydrogenase 1-like or a variant thereof, which is defined below in any of (27αA3-a) to (27αA3-e):
(27αA3-a) a protein comprising an amino acid sequence with deletion, substitution, insertion or addition of one or several amino acids in SEQ ID NO: 422;
(27αA3-b) a protein comprising an amino acid sequence having at least 70% identity to the amino acid sequence of SEQ ID NO: 422;
(27αA3-c) a protein comprising an amino acid sequence encoded by a nucleotide sequence with deletion, substitution, insertion or addition of one or several nucleotides in SEQ ID NO: 421;
(27αA3-d) a protein comprising an amino acid sequence encoded by a nucleotide sequence having at least 70% identity to the nucleotide sequence of SEQ ID NO: 421; or
(27αA3-e) a protein comprising an amino acid sequence encoded by a nucleic acid that hybridizes under stringent conditions with a nucleic acid having a nucleotide sequence complementary to the nucleotide sequence of SEQ ID NO: 421; or
(27αB3) a protein comprising at least one amino acid sequence selected from the group consisting of SEQ ID NOs: 423-427;
(28α) (28αA) 35 kDa seed maturation protein isoform X1 or a variant thereof, which is defined below in any of (28αA-a) to (28αA-e):
(28αA-a) a protein comprising an amino acid sequence with deletion, substitution, insertion or addition of one or several amino acids in SEQ ID NO: 429;
(28αA-b) a protein comprising an amino acid sequence having at least 70% identity to the amino acid sequence of SEQ ID NO: 429;
(28αA-c) a protein comprising an amino acid sequence encoded by a nucleotide sequence with deletion, substitution, insertion or addition of one or several nucleotides in SEQ ID NO: 428;
(28αA-d) a protein comprising an amino acid sequence encoded by a nucleotide sequence having at least 70% identity to the nucleotide sequence of SEQ ID NO: 428; or
(28αA-e) a protein comprising an amino acid sequence encoded by a nucleic acid that hybridizes under stringent conditions with a nucleic acid having a nucleotide sequence complementary to the nucleotide sequence of SEQ ID NO: 428; or
(28αB) a protein comprising at least one amino acid sequence selected from the group consisting of SEQ ID NOs: 430-433;
(29-33α) (29-33αA1) glyceraldehyde-3-phosphate dehydrogenase isoform X1 or a variant thereof, which is defined below in any of (29-33αA1-a) to (29-33αA1-e):
(29-33αA1-a) a protein comprising an amino acid sequence with deletion, substitution, insertion or addition of one or several amino acids in SEQ ID NO: 435;
(29-33αA1-b) a protein comprising an amino acid sequence having at least 70% identity to the amino acid sequence of SEQ ID NO: 435;
(29-33αA1-c) a protein comprising an amino acid sequence encoded by a nucleotide sequence with deletion, substitution, insertion or addition of one or several nucleotides in SEQ ID NO: 434;
(29-33αA1-d) a protein comprising an amino acid sequence encoded by a nucleotide sequence having at least 70% identity to the nucleotide sequence of SEQ ID NO: 434; or
(29-33αA1-e) a protein comprising an amino acid sequence encoded by a nucleic acid that hybridizes under stringent conditions with a nucleic acid having a nucleotide sequence complementary to the nucleotide sequence of SEQ ID NO: 434;
(29-33αB1) a protein comprising at least one amino acid sequence selected from the group consisting of SEQ ID NOs: 436-439;
(29-33αA2) glyceraldehyde-3-phosphate dehydrogenase, cytosolic or a variant thereof, which is defined below in any of (29-33αA2-a) to (29-33αA2-e):
(29-33αA2-a) a protein comprising an amino acid sequence with deletion, substitution, insertion or addition of one or several amino acids in SEQ ID NO: 441;
(29-33αA2-b) a protein comprising an amino acid sequence having at least 70% identity to the amino acid sequence of SEQ ID NO: 441;
(29-33αA2-c) a protein comprising an amino acid sequence encoded by a nucleotide sequence with deletion, substitution, insertion or addition of one or several nucleotides in SEQ ID NO: 440;
(29-33αA2-d) a protein comprising an amino acid sequence encoded by a nucleotide sequence having at least 70% identity to the nucleotide sequence of SEQ ID NO: 440; or
(29-33αA2-e) a protein comprising an amino acid sequence encoded by a nucleic acid that hybridizes under stringent conditions with a nucleic acid having a nucleotide sequence complementary to the nucleotide sequence of SEQ ID NO: 440;
(29-33αB2) a protein comprising at least one amino acid sequence selected from the group consisting of SEQ ID NOs: 442-445;
(29-33αA3) uncharacterized protein LOC100782924 or a variant thereof, which is defined below in any of (29-33αA3-a) to (29-33αA3-e):
(29-33αA3-a) a protein comprising an amino acid sequence with deletion, substitution, insertion or addition of one or several amino acids in SEQ ID NO: 447;
(29-33αA3-b) a protein comprising an amino acid sequence having at least 70% identity to the amino acid sequence of SEQ ID NO: 447;
(29-33αA3-c) a protein comprising an amino acid sequence encoded by a nucleotide sequence with deletion, substitution, insertion or addition of one or several nucleotides in SEQ ID NO: 446;
(29-33αA3-d) a protein comprising an amino acid sequence encoded by a nucleotide sequence having at least 70% identity to the nucleotide sequence of SEQ ID NO: 446; or
(29-33αA3-e) a protein comprising an amino acid sequence encoded by a nucleic acid that hybridizes under stringent conditions with a nucleic acid having a nucleotide sequence complementary to the nucleotide sequence of SEQ ID NO: 446; or
(29-33αB3) a protein comprising at least one amino acid sequence selected from the group consisting of SEQ ID NOs: 448-451,
(34α) (34αA1) bifunctional UDP-glucose 4-epimerase and UDP-xylose 4-epimerase 1-like or a variant thereof, which is defined below in any of (34αA1-a) to (34αA1-e):
(34αA1-a) a protein comprising an amino acid sequence with deletion, substitution, insertion or addition of one or several amino acids in SEQ ID NO: 453;
(34αA1-b) a protein comprising an amino acid sequence having at least 70% identity to the amino acid sequence of SEQ ID NO: 453;
(34αA1-c) a protein comprising an amino acid sequence encoded by a nucleotide sequence with deletion, substitution, insertion or addition of one or several nucleotides in SEQ ID NO: 452;
(34αA1-d) a protein comprising an amino acid sequence encoded by a nucleotide sequence having at least 70% identity to the nucleotide sequence of SEQ ID NO: 452; or
(34αA1-e) a protein comprising an amino acid sequence encoded by a nucleic acid that hybridizes under stringent conditions with a nucleic acid having a nucleotide sequence complementary to the nucleotide sequence of SEQ ID NO: 452;
(34αB1) a protein comprising an amino acid sequence of SEQ ID NO: 454;
(34αA2) uncharacterized protein LOC100803483 or a variant thereof, which is defined below in any of (34αA2-a) to (34αA2-e):
(34αA2-a) a protein comprising an amino acid sequence with deletion, substitution, insertion or addition of one or several amino acids in SEQ ID NO: 456;
(34αA2-b) a protein comprising an amino acid sequence having at least 70% identity to the amino acid sequence of SEQ ID NO: 456;
(34αA2-c) a protein comprising an amino acid sequence encoded by a nucleotide sequence with deletion, substitution, insertion or addition of one or several nucleotides in SEQ ID NO: 455;
(34αA2-d) a protein comprising an amino acid sequence encoded by a nucleotide sequence having at least 70% identity to the nucleotide sequence of SEQ ID NO: 455; or
(34αA2-e) a protein comprising an amino acid sequence encoded by a nucleic acid that hybridizes under stringent conditions with a nucleic acid having a nucleotide sequence complementary to the nucleotide sequence of SEQ ID NO: 455; or
(34αB2) a protein comprising at least one amino acid sequence selected from the group consisting of SEQ ID NOs: 457 and 458;
(35α) (35αA1) elongation factor 1-alpha or a variant thereof, which is defined below in any of (35αA1-a) to (35αA1-e):
(35αA1-a) a protein comprising an amino acid sequence with deletion, substitution, insertion or addition of one or several amino acids in SEQ ID NO: 460;
(35αA1-b) a protein comprising an amino acid sequence having at least 70% identity to the amino acid sequence of SEQ ID NO: 460;
(35αA1-c) a protein comprising an amino acid sequence encoded by a nucleotide sequence with deletion, substitution, insertion or addition of one or several nucleotides in SEQ ID NO: 459;
(35αA1-d) a protein comprising an amino acid sequence encoded by a nucleotide sequence having at least 70% identity to the nucleotide sequence of SEQ ID NO: 459; or
(35αA1-e) a protein comprising an amino acid sequence encoded by a nucleic acid that hybridizes under stringent conditions with a nucleic acid having a nucleotide sequence complementary to the nucleotide sequence of SEQ ID NO: 459;
(35αB1) a protein comprising at least one amino acid sequence selected from the group consisting of SEQ ID NOs: 461-466;
(35αA2) elongation factor 1-alpha or a variant thereof, which is defined below in any of (35αA2-a) to (35αA2-e):
(35αA2-a) a protein comprising an amino acid sequence with deletion, substitution, insertion or addition of one or several amino acids in SEQ ID NO: 468;
(35αA2-b) a protein comprising an amino acid sequence having at least 70% identity to the amino acid sequence of SEQ ID NO: 468;
(35αA2-c) a protein comprising an amino acid sequence encoded by a nucleotide sequence with deletion, substitution, insertion or addition of one or several nucleotides in SEQ ID NO: 467;
(35αA2-d) a protein comprising an amino acid sequence encoded by a nucleotide sequence having at least 70% identity to the nucleotide sequence of SEQ ID NO: 467; or
(35αA2-e) a protein comprising an amino acid sequence encoded by a nucleic acid that hybridizes under stringent conditions with a nucleic acid having a nucleotide sequence complementary to the nucleotide sequence of SEQ ID NO: 467;
(35αB2) a protein comprising at least one amino acid sequence selected from the group consisting of SEQ ID NOs: 469-471;
(35αA3) elongation factor-1αA isoform X1 or a variant thereof, which is defined below in any of (35αA3-a) to (35αA3-e):
(35αA3-a) a protein comprising an amino acid sequence with deletion, substitution, insertion or addition of one or several amino acids in SEQ ID NO: 473;
(35αA3-b) a protein comprising an amino acid sequence having at least 70% identity to the amino acid sequence of SEQ ID NO: 473;
(35αA3-c) a protein comprising an amino acid sequence encoded by a nucleotide sequence with deletion, substitution, insertion or addition of one or several nucleotides in SEQ ID NO: 472;
(35αA3-d) a protein comprising an amino acid sequence encoded by a nucleotide sequence having at least 70% identity to the nucleotide sequence of SEQ ID NO: 472; or
(35αA3-e) a protein comprising an amino acid sequence encoded by a nucleic acid that hybridizes under stringent conditions with a nucleic acid having a nucleotide sequence complementary to the nucleotide sequence of SEQ ID NO: 472; or
(35αB3) a protein comprising at least one amino acid sequence selected from the group consisting of SEQ ID NOs: 474-477;
(36, 37α) (36, 37αA1) seed maturation protein PM34 or a variant thereof, which is defined below in any of (36, 37αA1-a) to (36, 37αA1-e):
(36, 37αA1-a) a protein comprising an amino acid sequence with deletion, substitution, insertion or addition of one or several amino acids in SEQ ID NO: 479;
(36, 37αA1-b) a protein comprising an amino acid sequence having at least 70% identity to the amino acid sequence of SEQ ID NO: 479;
(36, 37αA1-c) a protein comprising an amino acid sequence encoded by a nucleotide sequence with deletion, substitution, insertion or addition of one or several nucleotides in SEQ ID NO: 478;
(36, 37αA1-d) a protein comprising an amino acid sequence encoded by a nucleotide sequence having at least 70% identity to the nucleotide sequence of SEQ ID NO: 478; or
(36, 37αA1-e) a protein comprising an amino acid sequence encoded by a nucleic acid that hybridizes under stringent conditions with a nucleic acid having a nucleotide sequence complementary to the nucleotide sequence of SEQ ID NO: 478;
(36, 37αB1) a protein comprising at least one amino acid sequence selected from the group consisting of SEQ ID NOs: 480-483;
(36, 37αA2) uncharacterized protein LOC100809384 or a variant thereof, which is defined below in any of (36, 37αA2-a) to (36, 37αA2-e):
(36, 37αA2-a) a protein comprising an amino acid sequence with deletion, substitution, insertion or addition of one or several amino acids in SEQ ID NO: 485;
(36, 37αA2-b) a protein comprising an amino acid sequence having at least 70% identity to the amino acid sequence of SEQ ID NO: 485;
(36, 37αA2-c) a protein comprising an amino acid sequence encoded by a nucleotide sequence with deletion, substitution, insertion or addition of one or several nucleotides in SEQ ID NO: 484;
(36, 37αA2-d) a protein comprising an amino acid sequence encoded by a nucleotide sequence having at least 70% identity to the nucleotide sequence of SEQ ID NO: 484; or
(36, 37αA2-e) a protein comprising an amino acid sequence encoded by a nucleic acid that hybridizes under stringent conditions with a nucleic acid having a nucleotide sequence complementary to the nucleotide sequence of SEQ ID NO: 484;
(36, 37αB2) a protein comprising at least one amino acid sequence selected from the group consisting of SEQ ID NOs: 486 and 487;
(36, 37αA3) hypothetical protein GLYMA_10 G155300 or a variant thereof, which is defined below in any of (36, 37αA3-a) to (36, 37αA3-e):
(36, 37αA3-a) a protein comprising an amino acid sequence with deletion, substitution, insertion or addition of one or several amino acids in SEQ ID NO: 489;
(36, 37αA3-b) a protein comprising an amino acid sequence having at least 70% identity to the amino acid sequence of SEQ ID NO: 489;
(36, 37αA3-c) a protein comprising an amino acid sequence encoded by a nucleotide sequence with deletion, substitution, insertion or addition of one or several nucleotides in SEQ ID NO: 488;
(36, 37αA3-d) a protein comprising an amino acid sequence encoded by a nucleotide sequence having at least 70% identity to the nucleotide sequence of SEQ ID NO: 488; or
(36, 37αA3-e) a protein comprising an amino acid sequence encoded by a nucleic acid that hybridizes under stringent conditions with a nucleic acid having a nucleotide sequence complementary to the nucleotide sequence of SEQ ID NO: 488; or
(36, 37αB3) a protein comprising at least one amino acid sequence selected from the group consisting of SEQ ID NOs: 490-493;
(38α) (38αA) seed biotin-containing protein SBP65-like isoform X1 or a variant thereof, which is defined below in any of (38αA-a) to (38αA-e):
(38αA-a) a protein comprising an amino acid sequence with deletion, substitution, insertion or addition of one or several amino acids in SEQ ID NO: 495;
(38αA-b) a protein comprising an amino acid sequence having at least 70% identity to the amino acid sequence of SEQ ID NO: 495;
(38αA-c) a protein comprising an amino acid sequence encoded by a nucleotide sequence with deletion, substitution, insertion or addition of one or several nucleotides in SEQ ID NO: 494;
(38αA-d) a protein comprising an amino acid sequence encoded by a nucleotide sequence having at least 70% identity to the nucleotide sequence of SEQ ID NO: 494; or
(38αA-e) a protein comprising an amino acid sequence encoded by a nucleic acid that hybridizes under stringent conditions with a nucleic acid having a nucleotide sequence complementary to the nucleotide sequence of SEQ ID NO: 494; or
(38αB) a protein comprising at least one amino acid sequence selected from the group consisting of SEQ ID NOs: 496-513;
(39α) (39αA) ATP synthase subunit 0, mitochondrial-like or a variant thereof, which is defined below in any of (39αA-a) to (39αA-e):
(39αA-a) a protein comprising an amino acid sequence with deletion, substitution, insertion or addition of one or several amino acids in SEQ ID NO: 515;
(39αA-b) a protein comprising an amino acid sequence having at least 70% identity to the amino acid sequence of SEQ ID NO: 515;
(39αA-c) a protein comprising an amino acid sequence encoded by a nucleotide sequence with deletion, substitution, insertion or addition of one or several nucleotides in SEQ ID NO: 514;
(39αA-d) a protein comprising an amino acid sequence encoded by a nucleotide sequence having at least 70% identity to the nucleotide sequence of SEQ ID NO: 514; or
(39αA-e) a protein comprising an amino acid sequence encoded by a nucleic acid that hybridizes under stringent conditions with a nucleic acid having a nucleotide sequence complementary to the nucleotide sequence of SEQ ID NO: 514; or
(39αB) a protein comprising an amino acid sequence of SEQ ID NO: 516;
(40, 56α) (40, 56αA) P24 oleosin isoform A or a variant thereof, which is defined below in any of (40, 56αA-a) to (40, 56αA-e):
(40, 56αA-a) a protein comprising an amino acid sequence with deletion, substitution, insertion or addition of one or several amino acids in SEQ ID NO: 518;
(40, 56αA-b) a protein comprising an amino acid sequence having at least 70% identity to the amino acid sequence of SEQ ID NO: 518;
(40, 56αA-c) a protein comprising an amino acid sequence encoded by a nucleotide sequence with deletion, substitution, insertion or addition of one or several nucleotides in SEQ ID NO: 517;
(40, 56αA-d) a protein comprising an amino acid sequence encoded by a nucleotide sequence having at least 70% identity to the nucleotide sequence of SEQ ID NO: 517; or
(40, 56αA-e) a protein comprising an amino acid sequence encoded by a nucleic acid that hybridizes under stringent conditions with a nucleic acid having a nucleotide sequence complementary to the nucleotide sequence of SEQ ID NO: 517; or
(40, 56αB) a protein comprising at least one amino acid sequence selected from the group consisting of SEQ ID NOs: 519 and 520;
(41α) (41αA) uncharacterized protein At3g49720-like isoform X2 or a variant thereof, which is defined below in any of (41αA-a) to (41αA-e):
(41αA-a) a protein comprising an amino acid sequence with deletion, substitution, insertion or addition of one or several amino acids in SEQ ID NO: 522;
(41αA-b) a protein comprising an amino acid sequence having at least 70% identity to the amino acid sequence of SEQ ID NO: 522;
(41αA-c) a protein comprising an amino acid sequence encoded by a nucleotide sequence with deletion, substitution, insertion or addition of one or several nucleotides in SEQ ID NO: 521;
(41αA-d) a protein comprising an amino acid sequence encoded by a nucleotide sequence having at least 70% identity to the nucleotide sequence of SEQ ID NO: 521; or
(41αA-e) a protein comprising an amino acid sequence encoded by a nucleic acid that hybridizes under stringent conditions with a nucleic acid having a nucleotide sequence complementary to the nucleotide sequence of SEQ ID NO: 521; or
(41αB) a protein comprising an amino acid sequence of SEQ ID NO: 523;
(42, 43α) (42, 43αA1) superoxide dismutase [Mn], mitochondrial or a variant thereof, which is defined below in any of (42, 43αA1-a) to (42, 43αA1-e):
(42, 43αA1-a) a protein comprising an amino acid sequence with deletion, substitution, insertion or addition of one or several amino acids in SEQ ID NO: 525;
(42, 43αA1-b) a protein comprising an amino acid sequence having at least 70% identity to the amino acid sequence of SEQ ID NO: 525;
(42, 43αA1-c) a protein comprising an amino acid sequence encoded by a nucleotide sequence with deletion, substitution, insertion or addition of one or several nucleotides in SEQ ID NO: 524;
(42, 43αA1-d) a protein comprising an amino acid sequence encoded by a nucleotide sequence having at least 70% identity to the nucleotide sequence of SEQ ID NO: 524; or
(42, 43αA1-e) a protein comprising an amino acid sequence encoded by a nucleic acid that hybridizes under stringent conditions with a nucleic acid having a nucleotide sequence complementary to the nucleotide sequence of SEQ ID NO: 524;
(42, 43αB1) a protein comprising at least one amino acid sequence selected from the group consisting of SEQ ID NOs: 526-531;
(42, 43αA2) hypothetical protein GLYMA_04 G221300 or a variant thereof, which is defined below in any of (42, 43αA2-a) to (42, 43αA2-e):
(42, 43αA2-a) a protein comprising an amino acid sequence with deletion, substitution, insertion or addition of one or several amino acids in SEQ ID NO: 533;
(42, 43αA2-b) a protein comprising an amino acid sequence having at least 70% identity to the amino acid sequence of SEQ ID NO: 533;
(42, 43αA2-c) a protein comprising an amino acid sequence encoded by a nucleotide sequence with deletion, substitution, insertion or addition of one or several nucleotides in SEQ ID NO: 532;
(42, 43αA2-d) a protein comprising an amino acid sequence encoded by a nucleotide sequence having at least 70% identity to the nucleotide sequence of SEQ ID NO: 532; or
(42, 43αA2-e) a protein comprising an amino acid sequence encoded by a nucleic acid that hybridizes under stringent conditions with a nucleic acid having a nucleotide sequence complementary to the nucleotide sequence of SEQ ID NO: 532; or
(42, 43αB2) a protein comprising at least one amino acid sequence selected from the group consisting of SEQ ID NOs: 534-539;
(45α) (45αA1) uncharacterized protein LOC100499771 or a variant thereof, which is defined below in any of (45αA1-a) to (45αA1-e):
(45αA1-a) a protein comprising an amino acid sequence with deletion, substitution, insertion or addition of one or several amino acids in SEQ ID NO: 541;
(45αA1-b) a protein comprising an amino acid sequence having at least 70% identity to the amino acid sequence of SEQ ID NO: 541;
(45αA1-c) a protein comprising an amino acid sequence encoded by a nucleotide sequence with deletion, substitution, insertion or addition of one or several nucleotides in SEQ ID NO: 540;
(45αA1-d) a protein comprising an amino acid sequence encoded by a nucleotide sequence having at least 70% identity to the nucleotide sequence of SEQ ID NO: 540; or
(45αA1-e) a protein comprising an amino acid sequence encoded by a nucleic acid that hybridizes under stringent conditions with a nucleic acid having a nucleotide sequence complementary to the nucleotide sequence of SEQ ID NO: 540;
(45αB1) a protein comprising at least one amino acid sequence selected from the group consisting of SEQ ID NOs: 542-545;
(45αA2) hypothetical protein GLYMA_09 G192800 or a variant thereof, which is defined below in any of (45αA2-a) to (45αA2-e):
(45αA2-a) a protein comprising an amino acid sequence with deletion, substitution, insertion or addition of one or several amino acids in SEQ ID NO: 547;
(45αA2-b) a protein comprising an amino acid sequence having at least 70% identity to the amino acid sequence of SEQ ID NO: 547;
(45αA2-c) a protein comprising an amino acid sequence encoded by a nucleotide sequence with deletion, substitution, insertion or addition of one or several nucleotides in SEQ ID NO: 546;
(45αA2-d) a protein comprising an amino acid sequence encoded by a nucleotide sequence having at least 70% identity to the nucleotide sequence of SEQ ID NO: 546; or
(45αA2-e) a protein comprising an amino acid sequence encoded by a nucleic acid that hybridizes under stringent conditions with a nucleic acid having a nucleotide sequence complementary to the nucleotide sequence of SEQ ID NO: 546; or
(45αB2) a protein comprising at least one amino acid sequence selected from the group consisting of SEQ ID NOs: 548-551;
(46α) (46αA) seed maturation protein PM22 or a variant thereof, which is defined below in any of (46αA-a) to (46αA-e):
(46αA-a) a protein comprising an amino acid sequence with deletion, substitution, insertion or addition of one or several amino acids in SEQ ID NO: 553;
(46αA-b) a protein comprising an amino acid sequence having at least 70% identity to the amino acid sequence of SEQ ID NO: 553;
(46αA-c) a protein comprising an amino acid sequence encoded by a nucleotide sequence with deletion, substitution, insertion or addition of one or several nucleotides in SEQ ID NO: 552;
(46αA-d) a protein comprising an amino acid sequence encoded by a nucleotide sequence having at least 70% identity to the nucleotide sequence of SEQ ID NO: 552; or
(46αA-e) a protein comprising an amino acid sequence encoded by a nucleic acid that hybridizes under stringent conditions with a nucleic acid having a nucleotide sequence complementary to the nucleotide sequence of SEQ ID NO: 552; or
(46αB) a protein comprising an amino acid sequence of SEQ ID NO: 554;
(47α) (47αA1) eukaryotic translation initiation factor 5αA-2 or a variant thereof, which is defined below in any of (47αA1-a) to (47αA1-e):
(47αA1-a) a protein comprising an amino acid sequence with deletion, substitution, insertion or addition of one or several amino acids in SEQ ID NO: 556;
(47αA1-b) a protein comprising an amino acid sequence having at least 70% identity to the amino acid sequence of SEQ ID NO: 556;
(47αA1-c) a protein comprising an amino acid sequence encoded by a nucleotide sequence with deletion, substitution, insertion or addition of one or several nucleotides in SEQ ID NO: 555;
(47αA1-d) a protein comprising an amino acid sequence encoded by a nucleotide sequence having at least 70% identity to the nucleotide sequence of SEQ ID NO: 555; or
(47αA1-e) a protein comprising an amino acid sequence encoded by a nucleic acid that hybridizes under stringent conditions with a nucleic acid having a nucleotide sequence complementary to the nucleotide sequence of SEQ ID NO: 555;
(47αB1) a protein comprising at least one amino acid sequence selected from the group consisting of SEQ ID NOs: 557-558;
(47αA2) uncharacterized protein LOC100305510 or a variant thereof, which is defined below in any of (47αA2-a) to (47αA2-e):
(47αA2-a) a protein comprising an amino acid sequence with deletion, substitution, insertion or addition of one or several amino acids in SEQ ID NO: 560;
(47αA2-b) a protein comprising an amino acid sequence having at least 70% identity to the amino acid sequence of SEQ ID NO: 560;
(47αA2-c) a protein comprising an amino acid sequence encoded by a nucleotide sequence with deletion, substitution, insertion or addition of one or several nucleotides in SEQ ID NO: 559;
(47αA2-d) a protein comprising an amino acid sequence encoded by a nucleotide sequence having at least 70% identity to the nucleotide sequence of SEQ ID NO: 559; or
(47αA2-e) a protein comprising an amino acid sequence encoded by a nucleic acid that hybridizes under stringent conditions with a nucleic acid having a nucleotide sequence complementary to the nucleotide sequence of SEQ ID NO: 559; or
(47αB2) a protein comprising at least one amino acid sequence selected from the group consisting of SEQ ID NOs: 561-563;
(48α) (48αA) uncharacterized protein LOC100306570 or a variant thereof, which is defined below in any of (48αA-a) to (48αA-e):
(48αA-a) a protein comprising an amino acid sequence with deletion, substitution, insertion or addition of one or several amino acids in SEQ ID NO: 565;
(48αA-b) a protein comprising an amino acid sequence having at least 70% identity to the amino acid sequence of SEQ ID NO: 565;
(48αA-c) a protein comprising an amino acid sequence encoded by a nucleotide sequence with deletion, substitution, insertion or addition of one or several nucleotides in SEQ ID NO: 564;
(48αA-d) a protein comprising an amino acid sequence encoded by a nucleotide sequence having at least 70% identity to the nucleotide sequence of SEQ ID NO: 564; or
(48αA-e) a protein comprising an amino acid sequence encoded by a nucleic acid that hybridizes under stringent conditions with a nucleic acid having a nucleotide sequence complementary to the nucleotide sequence of SEQ ID NO: 564; or
(48αB) a protein comprising at least one amino acid sequence selected from the group consisting of SEQ ID NOs: 566-570;
(50α) (50αA) uncharacterized protein LOC100813859 or a variant thereof, which is defined below in any of (50αA-a) to (50αA-e):
(50αA-a) a protein comprising an amino acid sequence with deletion, substitution, insertion or addition of one or several amino acids in SEQ ID NO: 572;
(50αA-b) a protein comprising an amino acid sequence having at least 70% identity to the amino acid sequence of SEQ ID NO: 572;
(50αA-c) a protein comprising an amino acid sequence encoded by a nucleotide sequence with deletion, substitution, insertion or addition of one or several nucleotides in SEQ ID NO: 571;
(50αA-d) a protein comprising an amino acid sequence encoded by a nucleotide sequence having at least 70% identity to the nucleotide sequence of SEQ ID NO: 571; or
(50αA-e) a protein comprising an amino acid sequence encoded by a nucleic acid that hybridizes under stringent conditions with a nucleic acid having a nucleotide sequence complementary to the nucleotide sequence of SEQ ID NO: 571; or
(50αB) a protein comprising at least one amino acid sequence selected from the group consisting of SEQ ID NOs: 573-576;
(51α) (51αA) 14-3-3-like protein or a variant thereof, which is defined below in any of (51αA-a) to (51αA-e):
(51αA-a) a protein comprising an amino acid sequence with deletion, substitution, insertion or addition of one or several amino acids in SEQ ID NO: 578;
(51αA-b) a protein comprising an amino acid sequence having at least 70% identity to the amino acid sequence of SEQ ID NO: 578;
(51αA-c) a protein comprising an amino acid sequence encoded by a nucleotide sequence with deletion, substitution, insertion or addition of one or several nucleotides in SEQ ID NO: 577;
(51αA-d) a protein comprising an amino acid sequence encoded by a nucleotide sequence having at least 70% identity to the nucleotide sequence of SEQ ID NO: 577; or
(51αA-e) a protein comprising an amino acid sequence encoded by a nucleic acid that hybridizes under stringent conditions with a nucleic acid having a nucleotide sequence complementary to the nucleotide sequence of SEQ ID NO: 577; or
(51αB) a protein comprising at least one amino acid sequence selected from the group consisting of SEQ ID NOs: 579-582;
(52α) (52αA) probable fructokinase-4 or a variant thereof, which is defined below in any of (52αA-a) to (52αA-e):
(52αA-a) a protein comprising an amino acid sequence with deletion, substitution, insertion or addition of one or several amino acids in SEQ ID NO: 584;
(52αA-b) a protein comprising an amino acid sequence having at least 70% identity to the amino acid sequence of SEQ ID NO: 584;
(52αA-c) a protein comprising an amino acid sequence encoded by a nucleotide sequence with deletion, substitution, insertion or addition of one or several nucleotides in SEQ ID NO: 583;
(52αA-d) a protein comprising an amino acid sequence encoded by a nucleotide sequence having at least 70% identity to the nucleotide sequence of SEQ ID NO: 583; or
(52αA-e) a protein comprising an amino acid sequence encoded by a nucleic acid that hybridizes under stringent conditions with a nucleic acid having a nucleotide sequence complementary to the nucleotide sequence of SEQ ID NO: 583; or
(52αB) a protein comprising at least one amino acid sequence selected from the group consisting of SEQ ID NOs: 585-588;
(53α) (53αA1) triosephosphate isomerase isoform X1 or a variant thereof, which is defined below in any of (53αA1-a) to (53αA1-e):
(53αA1-a) a protein comprising an amino acid sequence with deletion, substitution, insertion or addition of one or several amino acids in SEQ ID NO: 590;
(53αA1-b) a protein comprising an amino acid sequence having at least 70% identity to the amino acid sequence of SEQ ID NO: 590;
(53αA1-c) a protein comprising an amino acid sequence encoded by a nucleotide sequence with deletion, substitution, insertion or addition of one or several nucleotides in SEQ ID NO: 589;
(53αA1-d) a protein comprising an amino acid sequence encoded by a nucleotide sequence having at least 70% identity to the nucleotide sequence of SEQ ID NO: 589; or
(53αA1-e) a protein comprising an amino acid sequence encoded by a nucleic acid that hybridizes under stringent conditions with a nucleic acid having a nucleotide sequence complementary to the nucleotide sequence of SEQ ID NO: 589;
(53αB1) a protein comprising at least one amino acid sequence selected from the group consisting of SEQ ID NOs: 591-597;
(53αA2) triosephosphate isomerase, cytosolic or a variant thereof, which is defined below in any of (53αA2-a) to (53αA2-e):
(53αA2-a) a protein comprising an amino acid sequence with deletion, substitution, insertion or addition of one or several amino acids in SEQ ID NO: 599;
(53αA2-b) a protein comprising an amino acid sequence having at least 70% identity to the amino acid sequence of SEQ ID NO: 599;
(53αA2-c) a protein comprising an amino acid sequence encoded by a nucleotide sequence with deletion, substitution, insertion or addition of one or several nucleotides in SEQ ID NO: 598;
(53αA2-d) a protein comprising an amino acid sequence encoded by a nucleotide sequence having at least 70% identity to the nucleotide sequence of SEQ ID NO: 598; or
(53αA2-e) a protein comprising an amino acid sequence encoded by a nucleic acid that hybridizes under stringent conditions with a nucleic acid having a nucleotide sequence complementary to the nucleotide sequence of SEQ ID NO: 598; or
(53αB2) a protein comprising at least one amino acid sequence selected from the group consisting of SEQ ID NOs: 600-604;
(54α) (54αA1) superoxide dismutase [Fe], chloroplastic isoform X1 or a variant thereof, which is defined below in any of (54αA1-a) to (54αA1-e):
(54αA1-a) a protein comprising an amino acid sequence with deletion, substitution, insertion or addition of one or several amino acids in SEQ ID NO: 606;
(54αA1-b) a protein comprising an amino acid sequence having at least 70% identity to the amino acid sequence of SEQ ID NO: 606;
(53αA1-c) a protein comprising an amino acid sequence encoded by a nucleotide sequence with deletion, substitution, insertion or addition of one or several nucleotides in SEQ ID NO: 605;
(54αA1-d) a protein comprising an amino acid sequence encoded by a nucleotide sequence having at least 70% identity to the nucleotide sequence of SEQ ID NO: 605; or
(54αA1-e) a protein comprising an amino acid sequence encoded by a nucleic acid that hybridizes under stringent conditions with a nucleic acid having a nucleotide sequence complementary to the nucleotide sequence of SEQ ID NO: 605;
(54αB1) a protein comprising at least one amino acid sequence selected from the group consisting of SEQ ID NOs: 607-611;
(54αA2) iron-superoxide dismutase or a variant thereof, which is defined below in any of (54αA2-a) to (54αA2-e):
(54αA2-a) a protein comprising an amino acid sequence with deletion, substitution, insertion or addition of one or several amino acids in SEQ ID NO: 613;
(54αA2-b) a protein comprising an amino acid sequence having at least 70% identity to the amino acid sequence of SEQ ID NO: 613;
(54αA2-c) a protein comprising an amino acid sequence encoded by a nucleotide sequence with deletion, substitution, insertion or addition of one or several nucleotides in SEQ ID NO: 612;
(54αA2-d) a protein comprising an amino acid sequence encoded by a nucleotide sequence having at least 70% identity to the nucleotide sequence of SEQ ID NO: 612; or
(54αA2-e) a protein comprising an amino acid sequence encoded by a nucleic acid that hybridizes under stringent conditions with a nucleic acid having a nucleotide sequence complementary to the nucleotide sequence of SEQ ID NO: 612; or
(54αB2) a protein comprising at least one amino acid sequence selected from the group consisting of SEQ ID NOs: 614-616; or
(55α) (55αA1) 51 kDa seed maturation protein precursor or a variant thereof, which is defined below in any of (55αA1-a) to (55αA1-e):
(55αA1-a) a protein comprising an amino acid sequence with deletion, substitution, insertion or addition of one or several amino acids in SEQ ID NO: 618;
(55αA1-b) a protein comprising an amino acid sequence having at least 70% identity to the amino acid sequence of SEQ ID NO: 618;
(55αA1-c) a protein comprising an amino acid sequence encoded by a nucleotide sequence with deletion, substitution, insertion or addition of one or several nucleotides in SEQ ID NO: 617;
(55αA1-d) a protein comprising an amino acid sequence encoded by a nucleotide sequence having at least 70% identity to the nucleotide sequence of SEQ ID NO: 617; or
(55αA1-e) a protein comprising an amino acid sequence encoded by a nucleic acid that hybridizes under stringent conditions with a nucleic acid having a nucleotide sequence complementary to the nucleotide sequence of SEQ ID NO: 617;
(55αB1) a protein comprising at least one amino acid sequence selected from the group consisting of SEQ ID NOs: 619-635;
(55αA2) Lea protein precursor or a variant thereof, which is defined below in any of (55αA2-a) to (55αA2-e):
(55αA2-a) a protein comprising an amino acid sequence with deletion, substitution, insertion or addition of one or several amino acids in SEQ ID NO: 637;
(55αA2-b) a protein comprising an amino acid sequence having at least 70% identity to the amino acid sequence of SEQ ID NO: 637;
(55αA2-c) a protein comprising an amino acid sequence encoded by a nucleotide sequence with deletion, substitution, insertion or addition of one or several nucleotides in SEQ ID NO: 636;
(55αA2-d) a protein comprising an amino acid sequence encoded by a nucleotide sequence having at least 70% identity to the nucleotide sequence of SEQ ID NO: 636; or
(55αA2-e) a protein comprising an amino acid sequence encoded by a nucleic acid that hybridizes under stringent conditions with a nucleic acid having a nucleotide sequence complementary to the nucleotide sequence of SEQ ID NO: 636; or
(55αB2) a protein comprising at least one amino acid sequence selected from the group consisting of SEQ ID NOs: 638-649.

3. A composition for diagnosing an allergy to a soybean, the composition comprising, as an antigen, at least one of proteins as defined in any of (1) to (8) of claim 1.

4. A method for providing an indicator for diagnosing an allergy to a soybean in a subject, the method comprising the steps of:
(i) contacting a sample obtained from the subject with an antigen, wherein the sample is a solution comprising an Ig antibody;
(ii) detecting binding between the IgE antibody present in the sample obtained from the subject and the antigen; and
(iii) when the binding between the IgE antibody in the subject and the antigen is detected, an indicator of the fact that the subject is allergic to a soybean is provided;
wherein the antigen is at least one of proteins as defined in any of (1) to (8) of claim 1.

5. A pharmaceutical composition comprising at least one of proteins as defined in any of (1) to (8) of claim 1.

6. The pharmaceutical composition according to claim 5, wherein the pharmaceutical composition is intended for the treatment of an allergy to a soybean.

7. A soybean or a processed product of soybean in which an antigen is eliminated or reduced, wherein the antigen is at least one of proteins as defined in any of (1) to (8) of claim 1.

8. A tester for determining the presence or absence of a soybean antigen in an object of interest, the tester comprising an antibody that binds to at least one of proteins as defined in any of (1) to (8) of claim 1.

9. A soybean-derived antigen, which is at least one of proteins as defined in any of (1) to (8) of claim 1 and is causative of an allergy to a soybean.

10. A composition for diagnosing an allergy to a soybean, the composition comprising, as an antigen, at least one of proteins as defined in any of (1α) to (55α) of claim 2.

11. A method for providing an indicator for diagnosing an allergy to a soybean in a subject, the method comprising the steps of:
(i) contacting a sample obtained from the subject with an antigen, wherein the sample is a solution comprising an Ig antibody;
(ii) detecting binding between the IgE antibody present in the sample obtained from the subject and the antigen; and
(iii) when the binding between the IgE antibody in the subject and the antigen is detected, an indicator of the fact that the subject is allergic to a soybean is provided;
wherein the antigen is at least one of proteins as defined in any of (1α) to (55α) of claim 2.

12. A pharmaceutical composition comprising at least one of proteins as defined in any of (1α) to (55α) of claim 2.

13. The pharmaceutical composition according to claim 12, wherein the pharmaceutical composition is intended for the treatment of an allergy to a soybean.

14. A soybean or a processed product of soybean in which an antigen is eliminated or reduced, wherein the antigen is at least one of proteins as defined in any of (1α) to (55α) of claim 2.

15. A tester for determining the presence or absence of a soybean antigen in an object of interest, the tester comprising an antibody that binds to at least one of proteins as defined in any of (1α) to (55α) of claim 2.

16. A soybean-derived antigen, which is at least one of proteins as defined in any of (1α) to (55α) of claim 2 and is causative of an allergy to a soybean.
